(19) United States
(12) Patent Application Publication
(10) Pub. No.: US 2002/0144298 A1
(43) Pub. Date: Oct. 3, 2002

(54) Novel human genes and gene expression products

(76) Inventors: Wilson O. Endege, Norwood, MA (US); Kathleen E. Steinmann, Winchester, MA (US); Jon H. Astle, Taunton, MA (US); Christopher C. Burgess, Westwood, MA (US); Steven E. Bushnell, Medfield, MA (US); Eddie Carroll III, Waltham, MA (US); Theodore J. Catino, Attleboro, MA (US); Adnan Derti, Boston, MA (US); Donna M. Ford, Plainville, MA (US); Marcia E. Lewis, Cohasset, MA (US); John E. Mohahan, Walpole, MA (US); Robert Schlegel, Auburndale, MA (US)

Correspondence Address: PALMER & DODGE, LLP, ONE BEACON STREET, BOSTON, MA, 02108-3190, US

(21) Appl. No.: 09/879,536

(22) Filed: Jun. 11, 2001

Related U.S. Application Data
(63) Continuation of application No. 09/328,111, filed on Jun. 8, 1999, now Pat. No. 6,262,333.
(60) Provisional application No. 60/088,801, filed on Jun. 10, 1998.

(51) Int. Cl. A01K 67/00; C07H 21/04; C12N 5/06

(52) U.S. Cl. 800/8; 435/325; 435/320.1; 536/23.1

(57) ABSTRACT

This invention relates to novel human genes, to proteins expressed by the genes, and to variants of the proteins. The invention also relates to diagnostic assays and therapeutic agents related to the genes and proteins, including probes, antisense constructs, and antibodies. The subject nucleic acids have been found to be differentially regulated in tumor cells, particularly colon cancer cell lines and/or tissue.

[0001] This application is based on Provisional Application No. 60/088,801, filed Jun. 10, 1998, which is hereby incorporated herein by reference.

### FIELD OF THE INVENTION

[0002] The present invention provides nucleic acid sequences and proteins encoded thereby, as well as probes derived from the nucleic acid sequences, antibodies directed to the encoded proteins, and diagnostic methods for detecting cancerous cells, especially colon cancer cells.

### BACKGROUND OF THE INVENTION

[0003] Colorectal carcinoma is a malignant neoplastic disease. There is a high incidence of colorectal carcinoma in the Western world, particularly in the United States. Tumors of this type often metastasize through lymphatic and vascular channels. Many patients with colorectal carcinoma eventually die from this disease. In fact, it is estimated that 62,000 persons in the United States alone die of colorectal carcinoma annually.

[0004] However, if diagnosed early, colon cancer may be treated effectively by surgical removal of the cancerous tissue. Colorectal cancers originate in the colorectal epithelium and typically are not extensively vascularized (and therefore not invasive) during the early stages of development. Colorectal cancer is thought to result from the clonal expansion of a single mutant cell in the epithelial lining of the colon or rectum. The transition to a highly vascularized, invasive and ultimately metastatic cancer which spreads throughout the body commonly takes ten years or longer. If the cancer is detected prior to invasion, surgical removal of the cancerous tissue is an effective cure. However, colorectal cancer is often detected only upon manifestation of clinical symptoms, such as pain and black tarry stool. Generally, such symptoms are present only when the disease is well established, often after metastasis has occurred, and the prognosis for the patient is poor, even after surgical resection of the cancerous tissue. Early detection of colorectal cancer therefore is important in that detection may significantly reduce its morbidity.

[0005] Invasive diagnostic methods such as endoscopic examination allow for direct visual identification, removal, and biopsy of potentially cancerous growths such as polyps. Endoscopy is expensive, uncomfortable, inherently risky, and therefore not a practical tool for screening populations to identify those with colorectal cancer. Non-invasive analysis of stool samples for characteristics indicative of the presence of colorectal cancer or precancer is a preferred alternative for early diagnosis, but no known diagnostic method is available which reliably achieves this goal. A reliable, non-invasive, and accurate technique for diagnosing colon cancer at an early stage would help save many lives.

[0006] SUMMARY OF THE INVENTION

[0007] The present invention provides nucleic acid sequences and proteins encoded thereby, as well as probes derived from the nucleic acid sequences, antibodies directed to the encoded proteins, and diagnostic methods for detecting cancerous cells, especially colon cancer cells.

[0008] In one aspect, the invention provides an isolated nucleic acid comprising a nucleotide sequence which hybridizes under stringent conditions to a sequence of SEQ ID Nos. 1-127 or a sequence complementary thereto. In a related embodiment, the nucleic acid is at least about 80% or about 100% identical to a sequence corresponding to at least about 12, at least about 15, at least about 25, or at least about 40 consecutive nucleotides up to the full length of one of SEQ ID Nos. 1-127 or a sequence complementary thereto or up to the full length of the gene of which said sequence is a fragment. In certain embodiments, a nucleic acid of the present invention includes at least about five, at least about ten, or at least about twenty nucleic acids from a region designated as novel in Table 2. In certain other embodiments, a nucleic acid of the present invention includes at least about five, at least about ten, or at least about twenty nucleotides which are not included in corresponding clones whose accession numbers are listed in Table 2.

[0009] In one embodiment, the invention provides a nucleic acid comprising a nucleotide sequence which hybridizes under stringent conditions to a sequence of SEQ ID Nos. 1-127 or a sequence complementary thereto, and a transcriptional regulatory sequence operably linked to the nucleotide sequence to render the nucleotide sequence suitable for use as an expression vector. In another embodiment, the nucleic acid may be included in an expression vector capable of replicating in a prokaryotic or eukaryotic cell. In a related embodiment, the invention provides a host cell transfected with the expression vector.

[0010] In another embodiment, the invention provides a transgenic animal having a transgene of a nucleic acid comprising a nucleotide sequence which hybridizes under stringent conditions to a sequence of SEQ ID Nos. 1-127 or a sequence complementary thereto incorporated in cells thereof. The transgene modifies the level of expression of the nucleic acid, the stability of an mRNA transcript of the nucleic acid, or the activity of the encoded product of the nucleic acid.

[0011] In yet another embodiment, the invention provides substantially pure nucleic acid which hybridizes under stringent conditions to a nucleic acid probe corresponding to at least about 12, at least about 15, at least about 25, or at least about 40 consecutive nucleotides up to the full length of one of SEQ ID Nos. 1-127 or a sequence complementary thereto or up to the full length of the gene of which said sequence is a fragment. The invention also provides an antisense oligonucleotide analog which hybridizes under stringent conditions to at least 12, at least 25, or at least 50 consecutive nucleotides of one of SEQ ID Nos. 1-850 up to the full length of one of SEQ ID Nos. 1-850 or a sequence complementary thereto or up to the full length of the gene of which said sequence is a fragment, and which is resistant to cleavage by a nuclease, preferably an endogenous endonuclease or exonuclease.

[0012] In another embodiment, the invention provides a probe/primer comprising a substantially purified oligonucleotide, said oligonucleotide containing a region of nucleotide sequence which hybridizes under stringent conditions to at least about 12, at least about 15, at least about 25, or at least about 40 consecutive nucleotides of sense or antisense sequence selected from SEQ ID Nos. 1-127 up to the full length of one of SEQ ID Nos. 1-127 or a sequence complementary thereto or up to the full length of the gene of which said sequence is a fragment. In preferred embodiments, the probe selectively hybridizes with a target nucleic acid. In another embodiment, the probe may include a label group attached thereto and able to be detected. The label group may be selected from radioisotopes, fluorescent compounds, enzymes, and enzyme co-factors. The invention further provides arrays of at least about 10, at least about 25, at least about 50, or at least about 100 different probes as described above attached to a solid support.

[0013] In yet another embodiment, the invention pertains to a method of determining the phenotype of a cell, comprising detecting the differential expression, relative to a normal cell, of at least one nucleic acid which hybridizes under stringent conditions to one of SEQ ID Nos. 1-850, wherein the nucleic acid is differentially expressed by at least a factor of two, at least a factor of five, at least a factor of twenty, or at least a factor of fifty.

[0014] In another aspect, the invention provides polypeptides encoded by the subject nucleic acids. In one embodiment, the invention pertains to a polypeptide including an amino acid sequence encoded by a nucleic acid comprising a nucleotide sequence which hybridizes under stringent conditions to a sequence of SEQ ID Nos. 1-127 or a sequence complementary thereto, or a fragment comprising at least about 25, or at least about 40 amino acids thereof. Further provided are antibodies immunoreactive with these polypeptides.

[0015] In still another aspect, the invention provides diagnostic methods. In one embodiment, the invention pertains to a method for determining the phenotype of cells from a patient by providing a nucleic acid probe comprising a nucleotide sequence having at least 12, at least about 15., at least about 25, or at least about 40 consecutive nucleotides represented in a sequence of SEQ ID Nos. 1-850 up to the full length of one of SEQ ID Nos. 1-850.or a sequence complementary thereto or up to the full length of the gene of which said sequence is a fragment, obtaining a sample of cells from a patient, providing a second sample of cells substantially all of which are non-cancerous, contacting the nucleic acid probe under stringent conditions with mRNA of each of said first and second cell samples, and comparing (a) the amount of hybridization of the probe with mRNA of the first cell sample, with (b) the amount of hybridization of the probe with mRNA of the second cell sample, wherein a difference of at least a factor of two, at least a factor of five, at least a factor of twenty, or at least a factor of fifty in the amount of hybridization with the mRNA of the first cell sample as compared to the amount of hybridization with the mRNA of the second cell sample is indicative of the phenotype of cells in the first cell sample. Determining the phenotype includes determining the genotype, as the term is used herein.

[0016] In another embodiment, the invention provides a test kit for identifying an transformed cells, comprising a probe/primer as described above, for measuring a level of a nucleic acid which hybridizes under stringent conditions to a nucleic acid of SEQ ID Nos. 1-850 in a sample of cells isolated from a patient. In certain embodiments, the kit may further include instructions for using the kit, solutions for suspending or fixing the cells, detectable tags or labels, solutions for rendering a nucleic acid susceptible to hybridization, solutions for lysing cells, or solutions for the purification of nucleic acids.

[0017] In another embodiment, the invention provides a method of determining the phenotype of a cell, comprising detecting the differential expression, relative to a normal cell, of at least one protein encoded by a nucleic acid which hybridizes under stringent conditions to one of SEQ ID Nos. 1-850, wherein the protein is differentially expressed by at least a factor of two, at least a factor of five, at least a factor of twenty, or at least a factor of fifty. In one embodiment, the level of the protein is detected in an immunoassay. The invention also pertains to a method for determining the presence or absence of a nucleic acid which hybridizes under stringent conditions to one of SEQ ID Nos. 1-127 in a cell, comprising contacting the cell with a probe as described above. The invention further provides a method for determining the presence of absence of a subject polypeptide encoded by a nucleic acid which hybridizes under stringent conditions to one of SEQ ID Nos. 1-127 in a cell, comprising contacting the cell with an antibody as described above. In yet another embodiment, the invention provides a method for determining the presence of an aberrant mutation (e.g., deletion, insertion, or substitution of nucleic acids) or aberrant methylation in a gene which hybridizes under stringent conditions to a sequence of SEQ ID Nos. 1-383 or a sequence complementary thereto, comprising collecting a sample of cells from a patient, isolating nucleic acid from the cells of the sample, contacting the nucleic acid sample with one or more primers which specifically hybridize to a nucleic acid sequence of SEQ ID Nos. 1-850 under conditions such that hybridization and amplification of the nucleic acid occurs, and comparing the presence, absence, or size of an amplification product to the amplification product of a normal cell.

[0018] In one embodiment, the invention provides a test kit for identifying transformed cells, comprising an antibody specific for a protein encoded by a nucleic acid which hybridizes under stringent conditions to any one of SEQ Nos. 1-850. In certain embodiments, the kit further includes instructions for using the kit. In certain embodiments, the kit may further include instructions for using the kit, solutions for suspending or fixing the cells, detectable tags or labels, solutions for rendering a polypeptide susceptible to the binding of an antibody, solutions for lysing cells, or solutions for the purification of polypeptides.

[0019] In yet another aspect, the invention provides pharmaceutical compositions including the subject nucleic acids. In one embodiment, an agent which alters the level of expression in a cell of a nucleic acid which hybridizes under stringent conditions to one of SEQ ID Nos. 1-850 or a sequence complementary thereto is identified by providing a cell, treating the cell with a test agent, determining the level of expression in the cell of a nucleic-acid which hybridizes under stringent conditions to one of SEQ ID Nos. 1-850 or a sequence complementary thereto, and comparing the level of expression of the nucleic acid in the treated cell with the level of expression of the nucleic acid in an untreated cell, wherein a change in the level of expression of the nucleic acid in the treated cell relative to the level of expression of the nucleic acid in the untreated cell is indicative of an agent which alters the level of expression of the nucleic acid in a cell. The invention further provides a pharmaceutical composition comprising an agent identified by this method. In another embodiment, the invention provides a pharmaceutical composition which includes a polypeptide encoded by a nucleic acid having a nucleotide sequence that hybridizes under stringent conditions to one of SEQ ID Nos. 1-850 or a sequence complementary thereto. In one embodiment, the invention pertains to a pharmaceutical composition comprising a nucleic acid including a sequence which hybridizes under stringent conditions to one of SEQ ID Nos. 1-850 or a sequence complementary thereto.

### BRIEF DESCRIPTION OF THE FIGURES

[0020] The FIGURE depicts an exemplary assay result for determining differential expression of gene products in cells.

### DETAILED DESCRIPTION OF THE INVENTION

[0021] The invention relates to nucleic acids having the disclosed nucleotide sequences (SEQ ID Nos. 1-850), as well as full length cDNA, mRNA, and genes corresponding to these sequences, and to polypeptides and proteins encoded by these nucleic acids and genes and portions thereof.

[0022] Also included are nucleic acids that encode polypeptides and proteins encoded by the nucleic acids of SEQ ID Nos. 1-850. The various nucleic acids that can encode these polypeptides and proteins differ because of the degeneracy of the genetic code, in that most amino acids are encoded by more than one triplet codon. The identity of such codons is well known in this art, and this information can be used for the construction of the nucleic acids within the scope of the invention.

[0023] Nucleic acids encoding polypeptides and proteins that are variants of the polypeptides and proteins encoded by the nucleic acid and related cDNA and genes are also within the scope of the invention. The variants differ from wild-type protein in having one or more amino acid substitutions that either enhance, add, or diminish a biological activity of the wild-type protein. Once the amino acid change is selected, a nucleic acid encoding that variant is constructed according to the invention.

[0024] The following detailed description discloses how to obtain or make full-length cDNA and human genes corresponding to the nucleic acids, how to express these nucleic acids and genes, how to identify structural motifs of the genes, how to identify the function of a protein encoded by a gene corresponding to an nucleic acid, how to use nucleic acids as probes in mapping and in tissue profiling, how to use the corresponding polypeptides and proteins to raise antibodies, and how to use the nucleic acids, polypeptides, and proteins for therapeutic and diagnostic purposes.

[0025] The sequences investigated herein have been found to be differentially expressed in samples obtained from colon cancer cell lines and/or colon cancer tissue. However, it is also believed that these sequences may also have utility with other types of cancer.

[0026] Accordingly, certain aspects of the present invention relate to nucleic acids differentially expressed in tumor tissue, especially colon cancer cell lines, polypeptides encoded by such nucleic acids, and antibodies immunoreactive with these polypeptides, and preparations of such compositions. Moreover, the present invention provides diagnostic and therapeutic assays and reagents for detecting and treating disorders involving, for example, aberrant expression of the subject nucleic acids.

[0027] I. General

[0028] This invention relates in part to novel methods for identifying and/or classifying cancerous cells present in a human tumors, particularly in solid tumors, e.g., carcinomas and sarcomas, such as, for example, breast or colon cancers. The method uses genes that are differentially expressed in cancer cell lines and/or cancer tissue compared with related normal cells, such as normal colon cells, and thereby identifies or classifies tumor cells by the upregulation and/or downregulation of expression of particular genes, an event which is implicated in tumorigenesis.

[0029] Upregulation or increased expression of certain genes such as oncogenes, act to promote malignant growth. Downregulation or decreased expression of genes such as tumor suppressor genes promotes malignant growth. Thus, alteration in the expression of either type of gene is a potential diagnostic indicator for determining whether a subject is at risk of developing or has cancer, e.g., colon cancer.

[0030] Accordingly, in one aspect, the invention also provides biomarkers, such as nucleic acid markers, for human tumor cells, e.g., for colon cancer cells. The invention also provides proteins encoded by these nucleic acid markers.

[0031] The invention also features methods for identifying drugs useful for treatment of such cancer cells, and for treatment of a cancerous condition, such as colon cancer. Unlike prior methods, the invention provides a means for identifying cancer cells at an early stage of development, so that premalignant cells can be identified prior to their spreading throughout the human body. This allows early detection of potentially cancerous conditions, and treatment of those cancerous conditions prior to spread of the cancerous cells throughout the body, or prior to development of an irreversible cancerous condition.

[0032] II. Definitions

[0033] For convenience, the meaning of certain terms and phrases used in the specification, examples, and appended claims, are provided below.

[0034] The term “an aberrant expression”, as applied to a nucleic acid of the present invention, refers to level of expression of that nucleic acid which differs from the level of expression of that nucleic acid in healthy tissue, or which differs from the activity of the polypeptide present in a healthy subject. An activity of a polypeptide can be aberrant because it is stronger than the activity of its native counterpart Alternatively, an activity can be aberrant because it is weaker or absent relative to the activity of its native counterpart. An aberrant activity can also be a change in the activity; for example, an aberrant polypeptide can interact with a different target peptide. A cell can have an aberrant expression level of a gene due to overexpression or underexpression of that gene.

[0035] The term “agonist”, as used herein, is meant to refer to an agent that mimics or upregulates (e.g., potentiates or supplements) the bioactivity of a protein. An agonist can be a wild-type protein or derivative thereof having at least one bioactivity of the wild-type protein. An agonist can also be a compound that upregulates expression of a gene or which increases at least one bioactivity of a protein. An agonist can also be a compound which increases the interaction of a polypeptide with another molecule, e.g., a target peptide or nucleic acid.

[0036] The term “allele”, which is used interchangeably herein with “allelic variant”, refers to alternative forms of a gene or portions thereof. Alleles occupy the same locus or position on homologous chromosomes. When a subject has two identical alleles of a gene, the subject is said to be homozygous for that gene or allele. When a subject has two different alleles of a gene, the subject is said to be heterozygous for the gene. Alleles of a specific gene can differ from each other in a single nucleotide, or several nucleotides, and can include substitutions, deletions, and/or insertions of nucleotides. An allele of a gene can also be a form of a gene containing mutations.

[0037] The term “allelic variant of a polymorphic region of a gene” refers to a region of a gene having one of several nucleotide sequences found in that region of the gene in other individuals.

[0038] “Antagonist” as used herein is meant to refer to an agent that downregulates (e.g., suppresses or inhibits) at least one bioactivity of a protein. An antagonist can be a compound which inhibits or decreases the interaction between a protein and another molecule, e.g., a target peptide or enzyme substrate. An antagonist can also be a compound that downregulates expression of a gene or which reduces the amount of expressed protein present.

[0039] The term “antibody” as used herein is intended to include whole antibodies, e.g., of any isotype (IgG, IgA, IgM, IgE, etc.), and includes fragments thereof which are also specifically reactive with a vertebrate, e.g., mammalian, protein. Antibodies can be fragmented using conventional techniques and the fragments screened for utility in the same manner as described above for whole antibodies. Thus, the term includes segments of proteolytically-cleaved or recombinantly-prepared portions of an antibody molecule that are capable of selectively reacting with a certain protein. Nonlimiting examples of such proteolytic and/or recombinant fragments include Fab, F(ab′)2, Fab′, Fv, and single chain antibodies (scFv) containing a V[L] and/or V[H] domain joined by a peptide linker. The scFv's may be covalently or non-covalently linked to form antibodies having two or more binding sites. The subject invention includes polyclonal, monoclonal, or other purified preparations of antibodies and recombinant antibodies.

[0040] The phenomenon of “apoptosis” is well known, and can be described as a programmed death of cells. As is known, apoptosis is contrasted with “necrosis”, a phenomenon when cells die as a result of being killed by a toxic material, or other external effect. Apoptosis involves chromatic condensation, membrane blebbing, and fragmentation of DNA, all of which are generally visible upon microscopic examination.

[0041] A disease, disorder, or condition “associated with” or “characterized by” an aberrant expression of a nucleic acid refers to a disease, disorder, or condition in a subject which is caused by, contributed to by, or causative of an aberrant level of expression of a nucleic acid.

[0042] As used herein the term “bioactive fragment of a polypeptide” refers to a fragment of a full-length polypeptide, wherein the fragment specifically agonizes (mimics) or antagonizes (inhibits) the activity of a wild-type polypeptide. The bioactive fragment preferably is a fragment capable of interacting with at least one other molecule, e.g., protein, small molecule, or DNA, which a full length protein can bind.

[0043] “Biological activity” or “bioactivity” or “activity” or “biological function”, which arc used interchangeably, herein mean an effector or antigenic function that is directly or indirectly performed by a polypeptide (whether in its native or denatured conformation), or by any subsequence thereof Biological activities include binding to polypeptides, binding to other proteins or molecules, activity as a DNA binding protein, as a transcription regulator, ability to bind damaged DNA, etc. A bioactivity can be modulated by directly affecting the subject polypeptide. Alternatively, a bioactivity can be altered by modulating the level of the polypeptide, such as by modulating expression of the corresponding gene.

[0044] The term “biomarker” refers a biological molecule, e.g., a nucleic acid, peptide, hormone, etc., whose presence or concentration can be detected and correlated with a known condition, such as a disease state.

[0045] “Cells,” “host cells”, or “recombinant host cells” are terms used interchangeably herein. It is understood that such terms refer not only to the particular subject cell but to the progeny or potential progeny of such a cell. Because certain modifications may occur in succeeding generations due to either mutation or environmental influences, such progeny may not, in fact, be identical to the parent cell, but are still included within the scope of the term as used herein.

[0046] A “chimeric polypeptide” or “fusion polypeptide” is a fusion of a first amino acid sequence encoding one of the subject polypeptides with a second amino acid sequence defining a domain (e.g., polypeptide portion) foreign to and not substantially homologous with any domain of the subject polypeptide. A chimeric polypeptide may present a foreign domain which is found (albeit in a different polypeptide) in an organism which also expresses the first polypeptide, or it may be an “interspecies,” “intergenic,” etc., fusion of polypeptide structures expressed by different kinds of organisms. In general, a fusion polypeptide can be represented by the general formula

(X)ₙ-(Y)ₘ-(Z)ₙ,

[0047] wherein Y represents a portion of the subject polypeptide, and X and Z are each independently absent or represent amino acid sequences which are not related to the native sequence found in an organism, or which are not found as a polypeptide chain contiguous with the subject sequence, where m is an integer greater than or equal to one, and each occurrence of n is, independently, 0 or an integer greater than or equal to 1 (n and m are preferably no greater than 5 or 10).

[0048] A “delivery complex” shall mean a targeting means (e.g., a molecule that results in higher affinity binding of a nucleic acid, protein, polypeptide or peptide to a target cell surface and/or increased cellular or nuclear uptake by a target cell). Examples of targeting means include: sterols (e.g., cholesterol), lipids (e.g., a cationic lipid, virosome or liposome), viruses (e.g., adenovirus, adeno-associated virus, and retrovirus), or target cell-specific binding agents (e.g., ligands recognized by target cell specific receptors). Preferred complexes are sufficiently stable in vivo to prevent significant uncoupling prior to internalization by the target cell. However, the complex is cleavable under appropriate conditions within the cell so that the nucleic acid, protein, polypeptide or peptide is released in a functional form.

[0049] As is well known, genes or a particular polypeptide may exist in single or multiple copies within the genome of an individual. Such duplicate genes may be identical or may have certain modifications, including nucleotide substitutions, additions or deletions, which all still code for polypeptides having substantially the same activity. The term “DNA sequence encoding a polypeptide” may thus refer to one or more genes within a particular individual. Moreover, certain differences in nucleotide sequences may exist between individual organisms, which are called alleles. Such allelic differences may or may not result in differences in amino acid sequence of the encoded polypeptide yet still encode a polypeptide with the same biological activity.

[0050] The term “equivalent” is understood to include nucleotide sequences encoding functionally equivalent polypeptides. Equivalent nucleotide sequences will include sequences that differ by one or more nucleotide substitutions, additions or deletions, such as allelic variants; and will, therefore, include sequences that differ from the nucleotide sequence of the nucleic acids shown in SEQ ID NOs:1-850 due to the degeneracy of the genetic code.

[0051] As used herein, the terms “gene”, “recombinant gene”, and “gene construct” refer to a nucleic acid of the present invention associated with an open reading frame, including both exon and (optionally) intron sequences.

[0052] A “recombinant gene” refers to nucleic acid encoding a polypeptide and comprising exon sequences, though it may optionally include intron sequences which are derived from, for example, a related or unrelated chromosomal gene. The term “intron't refers to a DNA sequence present in a given gene which is not translated into protein and is generally found between exons.

[0053] The term “growth” or “growth state” of a cell refers to the proliferative state of a cell as well as to its differentiative state. Accordingly, the term refers to the phase of the cell cycle in which the cell is, e.g., G0, G1, G2, prophase, metaphase, or telophase, as well as to its state of differentiation, e.g., undifferentiated, partially differentiated, or fully differentiated. Without wanting to be limited, differentiation of a cell is usually accompanied by a decrease in the proliferative rate of a cell.

[0054] “Homology” or “identity” or “similarity” refers to sequence similarity between two peptides or between two nucleic acid molecules, with identity being a more strict comparison. Homology and identity can each be determined by comparing a position in each sequence which may be aligned for purposes of comparison. When a position in the compared sequence is occupied by the same base or amino acid, then the molecules are identical at that position. A degree of homology or similarity or identity between nucleic acid sequences is a function of the number of identical or matching nucleotides at positions shared by the nucleic acid sequences. A degree of identity of amino acid sequences is a function of the number of identical amino acids at positions shared by the amino acid sequences. A degree of homology or similarity of amino acid sequences is a function of the number of amino acids, i.e., structurally related, at positions shared by the amino acid sequences. An “unrelated” or “non-homologous” sequence shares less than 40% identity, though preferably less than 25% identity, with one of the sequences of the present invention.

[0055] The term “percent identical” refers to sequence identity between two amino acid sequences or between two nucleotide sequences. Identity can each be determined by comparing a position in each sequence which may be aligned for purposes of comparison. When an equivalent position in the compared sequences is occupied by the same base or amino acid, then the molecules are identical at that position; when the equivalent site occupied by the same or a similar amino acid residue (e.g., similar in steric and/or electronic nature), then the molecules can be referred to as homologous (similar) at that position. Expression as a percentage of homology, similarity, or identity refers to a function of the number of identical or similar amino acids at positions shared by the compared sequences. Various alignment algorithms and/or programs may be used, including FASTA, BLAST, or ENTREZ. FASTA and BLAST are available as a part of the GCG sequence analysis package (University of Wisconsin, Madison, Wis.), and can be used with, e.g., default settings. ENTREZ is available through the National Center for Biotechnology Information, National Library of Medicine, National Institutes of Health, Bethesda, Md. In one embodiment, the percent identity of two sequences can be determined by the GCG program with a gap weight of 1, e.g., each amino acid gap is weighted as if it were a single amino acid or nucleotide mismatch between the two sequences.

[0056] Other techniques for alignment are described in Methods in Enzymology, vol. 266: Computer Methods for Macromolecular Sequence Analysis (1996), ed. Doolittle, Academic Press, Inc., a division of Harcourt Brace & Co., San Diego, Calif., USA. Preferably, an alignment program that permits gaps in the sequence is utilized to align the sequences. The Smith-Waterman is one type of algorithm that permits gaps in sequence alignments. See Meth. Mol. Biol. 70: 173-187 (1997). Also, the GAP program using the Needleman and Wunsch alignment method can be utilized to align sequences. An alternative search strategy uses MPSRCH software, which runs on a MASPAR computer. MPSRCH uses a Smith-Waterman algorithm to score sequences on a massively parallel computer. This approach improves ability to pick up distantly related matches, and is especially tolerant of small gaps and nucleotide sequence errors. Nucleic acid-encoded amino acid sequences can be used to search both protein and DNA databases.

[0057] Databases with individual sequences are described in Methods in Enzymology, ed. Doolittle, supra. Databases include Genbank, EMBL, and DNA Database of Japan (DDBJ).

[0058] Preferred nucleic acids have a sequence at least 70%, and more preferably 80% identical and more preferably 90% and even more preferably at least 95% identical to an nucleic acid sequence of a sequence shown in one of SEQ ID NOS:1-850. Nucleic acids at least 90%, more preferably 95%, and most preferably at least about 98-99% identical with a nucleic sequence represented in one of SEQ ID NOS: 1-850 are of course also within the scope of the invention. In preferred embodiments, the nucleic acid is mammalian.

[0059] The term “interact” as used herein is meant to include detectable interactions (e.g., biochemical interactions) between molecules, such as interaction between protein-protein, protein-nucleic acid, nucleic acid-nucleic acid, and protein-small molecule or nucleic acid-small molecule in nature.

[0060] The term “isolated” as used herein with respect to nucleic acids, such as DNA or RNA, refers to molecules separated from other DNAs, or RNAs, respectively, that are present in the natural source of the macromolecule. The term isolated as used herein also refers to a nucleic acid or peptide that is substantially free of cellular material, viral material, or culture medium when produced by recombinant DNA techniques, or chemical precursors or other chemicals when chemically synthesized. Moreover, an “isolated nucleic acid” is meant to include nucleic acid fragments which are not naturally occurring as fragments and would not be found in the natural state. The term “isolated” is also used herein to refer to polypeptides which are isolated from other cellular proteins and is meant to encompass both purified and recombinant polypeptides.

[0061] The terms “modulated” and “differentially regulated” as used herein refer to both upregulation (i.e., activation or stimulation (e.g., by agonizing or potentiating)) and downregulation (i.e., inhibition or suppression (e.g., by antagonizing, decreasing or inhibiting)).

[0062] The term “mutated gene” refers to an allelic form of a gene, which is capable of altering the phenotype of a subject having the mutated gene relative to a subject which does not have the mutated gene. If a subject must be homozygous for this mutation to have an altered phenotype, the mutation is said to be recessive. If one copy of the mutated gene is sufficient to alter the genotype of the subject, the mutation is said to be dominant. If a subject has one copy of the mutated gene and has a phenotype that is intermediate between that of a homozygous and that of a heterozygous subject (for that gene), the mutation is said to be co-dominant.

[0063] The designation “N”, where it appears in the accompanying Sequence Listing, indicates that the identity of the corresponding nucleotide is unknown. “N” should therefore not necessarily be interpreted as permitting substitution with any nucleotide, e.g., A, T, C, or G, but rather as holding the place of a nucleotide whose identity has not been conclusively determined.

[0064] The “non-human animals” of the invention include mammalians such as rodents, non-human primates, sheep, dog, cow, chickens, amphibians, reptiles, etc. Preferred non-human animals are selected from the rodent family including rat and mouse, most preferably mouse, though transgenic amphibians, such as members of the Xenopus genus, and transgenic chickens can also provide important tools for understanding and identifying agents which can affect, for example, embryogenesis and tissue formation. The term chimeric animal” is used herein to refer to animals in which the recombinant gene is found, or in which the recombinant gene is expressed in some but not all cells of the animal. The term “tissue-specific chimeric animal” indicates that one of the recombinant genes is present and/or expressed or disrupted in some tissues but not others.

[0065] As used herein,.the term “nucleic acid” refers to polynucleotides such as deoxyribonucleic acid (DNA), and, where appropriate, ribonucleic acid (RNA). The term should also be understood to include, as equivalents, analogs of either RNA or DNA made from nucleotide analogs, and, as applicable to the embodiment being described, single (sense or antisense) and double-stranded polynucleotides. ESTs, chromosomes, cDNAs, mRNAs, and rRNAs are representative examples of molecules that may be referred to as nucleic acids.

[0066] The term “nucleotide sequence complementary to the nucleotide sequence of SEQ ID NO. x” refers to the nucleotide sequence of the complementary strand of a nucleic acid strand having SEQ ID NO. x. The term “complementary strand” is used herein interchangeably with the term “complement”. The complement of a nucleic acid strand can be the complement of a coding strand or the complement of a non-coding strand.

[0067] The term “polymorphism refers to the coexistence of more than one form of a gene or portion (e.g., allelic variant) thereof. A portion of a gene of which there are at least two different forms, i.e., two different nucleotide sequences, is referred to as a “polymorphic region of a gene”. A polymorphic region can be a single nucleotide, the identity of which differs in different alleles. A polymorphic region can also be several nucleotides long.

[0068] A “polymorphic gene” refers to a gene having at least one polymorphic region.

[0069] As used herein, the term “promoter” means a DNA sequence that regulates expression of a selected DNA sequence operably linked to the promoter, and which effects expression of the selected DNA sequence in cells. The term encompasses “tissue specific” promoters, i.e., promoters which effect expression of the selected DNA sequence only in specific cells (e.g., cells of a specific tissue). The term also covers so called “leaky” promoters, which regulate expression of a selected DNA primarily in one tissue, but cause expression in other tissues as well. The term also encompasses non-tissue specific promoters and promoters that constitutively express or that are inducible (i.e., expression levels can be controlled).

[0070] The terms “protein”, “polypeptide”, and “peptide” are used interchangeably herein when referring to a gene product.

[0071] The term “recombinant protein” refers to a polypeptide of the present invention which is produced by recombinant DNA techniques, wherein generally, DNA encoding a polypeptide is inserted into a suitable expression vector which is in turn used to transform a host cell to produce the heterologous protein. Moreover, the phrase “derived from”, with respect to a recombinant gene, is meant to include within the meaning of “recombinant protein” those proteins having an amino acid sequence of a native polypeptide, or an amino acid sequence similar thereto which is generated by mutations including substitutions and deletions (including truncation) of a naturally occurring form of the polypeptide.

[0072] “Small molecule” as used herein, is meant to refer to a composition, which has a molecular weight of less than about 5 kD and most preferably less than about 4 kD. Small molecules can be nucleic acids, peptides, polypeptides, peptidomimetics, carbohydrates, lipids or other organic (carbon-containing) or inorganic molecules. Many pharmaceutical companies have extensive libraries of chemical and/or biological mixtures, often fungal, bacterial, or algal extracts, which can be screened with any of the assays of the invention to identify compounds that modulate a bioactivity.

[0073] As used herein, the term “specifically hybridizes” or “specifically detects” refers to the ability of a nucleic acid molecule of the invention to hybridize to at least a portion of, for example approximately 6, 12, 15, 20, 30, 50, 100, 150, 200, 300, 350, 400, 500, 750 or 1000 contiguous nucleotides of a nucleic acid designated in any one of SEQ ID Nos:1-850, or a sequence complementary thereto, or naturally occurring mutants thereof, such that it has less than 15%, preferably less than 10%, and more preferably less than 5% background hybridization to a cellular nucleic acid (e.g., mRNA or genomic DNA) encoding a different protein. In preferred embodiments, the oligonucleotide probe detects only a specific nucleic acid, e.g., it does not substantially hybridize to similar or related nucleic acids, or complements thereof.

[0074] “Transcriptional regulatory sequence” is a generic term used throughout the specification to refer to DNA sequences, such as initiation signals, enhancers, and promoters, which induce or control transcription of protein coding sequences with which they are operably linked. In preferred embodiments, transcription of one of the genes is under the control of a promoter sequence (or other transcriptional regulatory sequence) which controls the expression of the recombinant gene in a cell-type in which expression is intended. It will also be understood that the recombinant gene can be under the control of transcriptional regulatory sequences which are the same or which are different from those sequences which control transcription of the naturally-occurring forms of the polypeptide.

[0075] As used herein, the term “transfection” means the introduction of a nucleic acid, e.g., via an expression vector, into a recipient cell by nucleic acid-mediated gene transfer. “Transformation”, as used herein, refers to a process in which a cell's genotype is changed as a result of the cellular uptake of exogenous DNA or RNA, and, for example, the transformed cell expresses a recombinant form of a polypeptide or, in the case of anti-sense expression from the transferred gene, the expression of the target gene is disrupted.

[0076] As used herein, the term “transgene” means a nucleic acid sequence (or an antisense transcript thereto) which has been introduced into a cell. A transgene could be partly or entirely heterologous, i.e., foreign, to the transgenic animal or cell into which it is introduced, or, is homologous to an endogenous gene of the transgenic animal or cell into which it is introduced, but which is designed to be inserted, or is inserted, into the animal's genome in such a way as to alter the genome of the cell into which it is inserted (e.g., it is inserted at a location which differs from that of the natural gene or its insertion results in a knockout). A transgene can also be present in a cell in the form of an episome. A transgene can include one or more transcriptional regulatory sequences and any other nucleic acid, such as introns, that may be necessary for optimal expression of a selected nucleic acid.

[0077] A “transgenic animal” refers to any animal, preferably a non-human mammal, bird or an amphibian, in which one or more of the cells of the animal contain heterologous nucleic acid introduced by way of human intervention, such as by transgenic techniques well known in the art. The nucleic acid is introduced into the cell, directly or indirectly by introduction into a precursor of the cell, by way of deliberate genetic manipulation, such as by microinjection or by infection with a recombinant virus. The term genetic manipulation does not include classical cross-breeding, or in vitro fertilization, but rather is directed to the introduction of a recombinant DNA molecule. This molecule may be integrated within a chromosome, or it may be extra-chromosomally replicating DNA. In the typical transgenic animals described herein, the transgene causes cells to express a recombinant form of one of the subject polypeptide, e.g. either agonistic or antagonistic forms. However, transgenic animals in which the recombinant gene is silent are also contemplated, as for example, the FLP or CRE recombinase dependent constructs described below. Moreover, “transgenic animal” also includes those recombinant animals in which gene disruption of one or more genes is caused by human intervention, including both recombination and antisense techniques.

[0078] The term “treating” as used herein is intended to encompass curing as well as ameliorating at least one symptom of the condition or disease.

[0079] The term “vector” refers to a nucleic acid molecule capable of transporting another nucleic acid to which it has been linked. One type of preferred vector is an episome, i.e., a nucleic acid capable of extrachromosomal replication. Preferred vectors are those capable of autonomous replication and/or expression of nucleic acids to which they are linked. Vectors capable of directing the expression of genes to which they are operatively linked are referred to herein as “expression vectors”. In general, expression vectors of utility in recombinant DNA techniques are often in the form of “plasmids” which refer generally to circular double stranded DNA loops which, in their vector form are not bound to the chromosome. In the present specification, “plasmid” and “vector” are used interchangeably as the plasmid is the most commonly used form of vector. However, the invention is intended to include such other forms of expression vectors which serve equivalent functions and which become known in the art subsequently hereto.

[0080] The term “wild-type allele” refers to an allele of a gene which, when present in two copies in a subject results in a wild-type phenotype. There can be several different wild-type alleles of a specific gene, since certain nucleotide changes in a gene may not affect the phenotype of a subject having two copies of the gene with the nucleotide changes.

[0081] III. Nucleic Acids of the Present Invention

[0082] As described below, one aspect of the invention pertains to isolated nucleic acids, variants, and/or equivalents of such nucleic acids.

[0083] Nucleic acids of the present invention have been identified as differentially expressed in tumor cells, e.g., colon cancer-derived cell lines (relative to the expression levels in normal tissue, e.g., normal colon tissue and/or normal non-colon tissue), such as SEQ ID Nos. 1-850, preferably SEQ ID Nos. 1-383, even more preferably SEQ ID Nos. 1-127, or a sequence complementary thereto. In certain embodiments, the subject nucleic acids are differentially expressed by at least a factor of two, preferably at least a factor of five, even more preferably at least a factor of twenty, still more preferably at least a factor of fifty. Preferred nucleic acids include sequences identified as differentially expressed both in colon cancer cell tissue and colon cancer cell lines. In preferred embodiments, nucleic acids of the present invention are upregulated in tumor cells, especially colon cancer tissue and/or colon cancer-derived cell lines. In another embodiment, nucleic acids of the present invention are downregulated in tumor cells, especially colon cancer tissue and/or colon cancer-derived cell lines.

[0084] Table 1 indicates those sequences which are over or underexpressed in a colon cancer-derived cell line relative to normal tissue, and further designates those sequences which are also differentially regulated in colon cancer tissue. The designation O indicates that the corresponding sequence was overexpressed, M indicates possible overexpression, N indicates no differential expression, and U indicates underexpression.

[0085] Genes which are upregulated, such as oncogenes, or downregulated, such as tumor suppressors, in aberrantly proliferating cells may be targets for diagnostic or therapeutic techniques. For example, upregulation of the cdc2 gene induces mitosis. Overexpression of the myt1 gene, a mitotic deactivator, negatively regulates the activity of cdc2. Aberrant proliferation may thus be induced either by upregulating cdc2 or by downregulating myt1. Similarly, downregulation of tumor suppressors such as p53 and Rb have been implicated in tumorigenesis.

[0086] Particularly preferred polypeptides are those that are encoded by nucleic acid sequences at least about 70%, 75%, 80%, 90%, 95%, 97%, or 98% similar to a nucleic acid sequence of SEQ ID Nos. 1-850. Preferably, the nucleic acid includes all or a portion (e.g., at least about 12, at least about 15, at least about 25, or at least about 40 nucleotides) of the nucleotide sequence corresponding to the nucleic acid of SEQ ID Nos. 1-383, preferably SEQ ID Nos. 1-127, or a sequence complementary thereto.

[0087] Still other preferred nucleic acids of the present invention encode a polypeptide comprising at least a portion of a polypeptide encoded by one of SEQ ID Nos. 1-850. For example, preferred nucleic acid molecules for use as probes/primers or antisense molecules (i.e., noncoding nucleic acid molecules) can comprise at least about 12, 20, 30, 50, 60, 70, 80, 90, or 100 base pairs in length up to the length of the complete gene. Coding nucleic acid molecules can comprise, for example, from about 50, 60, 70, 80, 90, or 100 base pairs up to the length of the complete gene.

[0088] Another aspect of the invention provides a nucleic acid which hybridizes under low, medium, or high stringency conditions to a nucleic acid sequence represented by one of SEQ ID Nos. 1-383, preferably SEQ ID Nos. 1-127, or a sequence complementary thereto. Appropriate stringency conditions which promote DNA hybridization, for example, 6.0×sodium chloride/sodium citrate (SSC) at about 45° C., followed by a wash of 2.0×SSC at 50° C., are known to those skilled in the art or can be found in Current Protocols in Molecular Biology, John Wiley & Sons, N.Y. (1989), 6.3.1-12.3.6. For example, the salt concentration in the wash step can be selected from a low stringency of about 2.0×SSC at 50° C. to a high stringency of about 0.2×SSC at 50° C. In addition, the temperature in the wash step can be increased from low stringency conditions at room temperature, about 22° C., to high stringency conditions at about 65° C. Both temperature and salt may be varied, or temperature or salt concentration may be held constant while the other variable is changed. In a preferred embodiment, a nucleic acid of the present invention will bind to one of SEQ ID Nos. 1-383, preferably SEQ ID Nos. 1-127, or a sequence complementary thereto, under moderately stringent conditions, for example at about 2.0×SSC and about 40° C. In a particularly preferred embodiment, a nucleic acid of the present invention will bind to one of SEQ ID Nos. 1-383, preferably SEQ ID Nos. 1-127, or a sequence complementary thereto, under high stringency conditions.

[0089] In one embodiment, the invention provides nucleic acids which hybridize under low stringency conditions of 6×SSC at room temperature followed by a wash at 2×SSC at room temperature.

[0090] In another embodiment, the invention provides nucleic acids which hybridize under high stringency conditions of 2×SSC at 65° C. followed by a wash at 0.2×SSC at 65° C.

[0091] Nucleic acids having a sequence that differs from the nucleotide sequences shown in one of SEQ ID Nos. 1-383, preferably SEQ ID Nos. 1-1 27, or a sequence complementary thereto, due to degeneracy in the genetic code, are also within the scope of the invention. Such nucleic acids encode functionally equivalent peptides (i.e., a peptide having equivalent or similar biological activity) but differ in sequence from the sequence shown in the sequence listing due to degeneracy in the genetic code. For example, a number of amino acids are designated by more than one triplet. Codons that specify the same amino acid, or synonyms (for example, CAU and CAC each encode histidine) may result in “silent” mutations which do not affect the amino acid sequence of a polypeptide. However, it is expected that DNA sequence polymorphisms that do lead to changes in the amino acid sequences of the subject polypeptides will exist among mammals. One skilled in the art will appreciate that these variations in one or more nucleotides (e.g., up to about 3-5% of the nucleotides) of the nucleic acids encoding polypeptides having an activity of a polypeptide may exist among individuals of a given species due to natural allelic variation.

[0092] Also within the scope of the invention are nucleic acids encoding splicing variants of proteins encoded by a nucleic acid of SEQ ID Nos. 1-850, preferably SEQ ID Nos. 1-383, even more preferably SEQ ID Nos. 1-127, or a sequence complementary thereto, or natural homologs of such proteins. Such homologs can be cloned by hybridization or PCR, as further described herein.

[0093] The polynucleotide sequence may also encode for a leader sequence, e.g., the natural leader sequence or a heterologous leader sequence, for a subject polypeptide. For example, the desired DNA sequence may be fused in the same reading frame to a DNA sequence which aids in expression and secretion of the polypeptide from the host cell, for example, a leader sequence which functions as a secretory sequence for controlling transport of the polypeptide from the cell. The protein having a leader sequence is a preprotein and may have the leader sequence cleaved by the host cell to form the mature form of the protein.

[0094] The polynucleotide of the present invention may also be fused in frame to a marker sequence, also referred to herein as “Tag sequence” encoding a “Tag peptide”, which allows for marking and/or purification of the polypeptide of the present invention. In a preferred embodiment, the marker sequence is a hexahistidine tag, e.g., supplied by a PQE-9 vector. Numerous other Tag peptides are available commercially. Other frequently used Tags include myc-epitopes (e.g., see Ellison et al. (1991) J Biol Chem 266:21150-21157) which includes a 10-residue sequence from c-myc, the pFLAG system (International Biotechnologies, Inc.), the pEZZ-protein A system (Pharmacia, N.J.), and a 16 amino acid portion of the Haemophilus influenza hemagglutinin protein. Furthermore, any polypeptide can be used as a Tag so long as a reagent, e.g., an antibody interacting specifically with the Tag polypeptide is available or can be prepared or identified.

[0095] As indicated by the examples set out below, nucleic acids can be obtained from mRNA present in any of a number of eukaryotic cells, e.g., and are preferably obtained from metazoan cells, more preferably from vertebrate cells, and even more preferably from mammalian cells. It should also be possible to obtain nucleic acids of the present invention from genomic DNA from both adults and embryos. For example, a gene can be cloned from either a cDNA or a genomic library in accordance with protocols generally known to persons skilled in the art. cDNA can be obtained by isolating total mRNA from a cell, e.g., a vertebrate cell, a mammalian cell, or a human cell, including embryonic cells. Double stranded cDNAs can then be prepared from the total mRNA, and subsequently inserted into a suitable plasmid or bacteriophage vector using any one of a number of known techniques. The gene can also be cloned using established polymerase chain reaction techniques in accordance with the nucleotide sequence information provided by the invention.

[0096] In certain embodiments, a nucleic acid, probe, vector, or other construct of the present invention includes at least about five, at least about ten, or at least about twenty nucleic acids from a region designated as novel in Table 2. In certain other embodiments, a nucleic acid of the present invention includes at least about five, at least about ten, or at least about twenty nucleic acids which are not included in the clones whose accession numbers are listed in Table 2.

[0097] The invention includes within its scope a polynucleotide having the nucleotide sequence of nucleic acid obtained from this biological material, wherein the nucleic acid hybridizes under stringent conditions (at least about 4×SSC at 65° C., or at least about 4×SSC at 42° C.; see, for example, U.S. Pat. No. 5,707,829, incorporated herein by reference) with at least 15 contiguous nucleotides of at least one of SEQ ID Nos. 1-850. By this is intended that when at least 15 contiguous nucleotides of one of SEQ ID Nos. 1-850 is used as a probe, the probe will preferentially hybridize with a gene or mRNA (of the biological material) comprising the complementary sequence, allowing the identification and retrieval of the nucleic acids of the biological material that uniquely hybridize to the selected probe. Probes from more than one of SEQ ID Nos. 1-850 will hybridize with the same gene or mRNA if the cDNA from which they were derived corresponds to one mRNA. Probes of more Man 15 nucleotides can be used, but 15 nucleotides represents enough sequence for unique identification.

[0098] Because the present nucleic acids represent partial mRNA transcripts, two or more nucleic acids of the invention may represent different regions of the same mRNA transcript and the same gene. Thus, if two or more of SEQ ID Nos. 1-850 are identified as belonging to the same clone, then either sequence can be used to obtain the full-length mRNA or gene.

[0099] Nucleic acid-related polynucleotides can also be isolated from cDNA libraries. These libraries are preferably prepared from mRNA of human colon cells, more preferably, human colon cancer cells, even more preferably, from a human colon adenocarcinoma cell line, SW480. Alignment of SEQ ID Nos. 1-850, as described above, can indicated that a cell line or tissue source of a related protein or polynucleotide can also be used as a source of the nucleic acid-related cDNA.

[0100] Techniques for producing and probing nucleic acid sequence libraries are described, for example, in Sambrook et al., “Molecular Cloning: A Laboratory Manual” (New York, Cold Spring Harbor Laboratory, 1989). The cDNA can be prepared by using primers based on a sequence from SEQ ID Nos. 1-850. In one embodiment, the cDNA library can be made from only poly-adenylated mRNA. Thus, poly-T primers can be used to prepare cDNA from the mRNA. Alignment of SEQ ID Nos. 1-850 can result in identification of a related polypeptide or polynucleotide. Some of the polynucleotides disclosed herein contains repetitive regions that were subject to masking during the search procedures. The information about the repetitive regions is discussed below.

[0101] Constructs of polynucleotides having sequences of SEQ ID Nos. 1-850 can be generated synthetically. Alternatively, single-step assembly of a gene and entire plasmid from large numbers of oligodeoxyribonucleotides is described by Stemmer et al, Gene (Amsterdam) (1995) 164(1):49-53. In this method, assembly PCR (the synthesis of long DNA sequences from large numbers of oligodeoxyribonucleotides (oligos)) is described. The method is derived from DNA shuffling (Stemmer, Nature (1994) 370:389-391), and does not rely on DNA ligase, but instead relies on DNA polymerase to build increasingly longer DNA fragments during the assembly process. For example, a 1.1-kb fragment containing the TEM-1 beta-lactamase-encoding gene (bla) can be assembled in a single reaction from a total of 56 oligos, each 40 nucleotides (nt) in length. The synthetic gene can be PCR amplified and cloned in a vector containing the tetracycline-resistance gene (Tc-R) as the sole selectable marker. Without relying on ampicillin (Ap) selection, 76% of the Tc-R colonies were Ap-R, making this approach a general method for the rapid and cost-effective synthesis of any gene.

[0102] IV. Identification of Functional and Structural Motifs of Novel Genes Using Art-Recognized Methods

[0103] Translations of the nucleotide sequence of the nucleic acids, cDNAs, or full genes can be aligned with individual known sequences. Similarity with individual sequences can be used to determine the activity of the polypeptides encoded by the polynucleotides of the invention. For example, sequences that show similarity with a chemokine sequence may exhibit chemokine activities. Also, sequences exhibiting similarity with more than one individual sequence may exhibit activities that are characteristic of either or both individual sequences.

[0104] The full length sequences and fragments of the polynucleotide sequences of the nearest neighbors can be used as probes and primers to identify and isolate the full length sequence of the nucleic acid. The nearest neighbors can indicate a tissue or cell type to be used to construct a library for the full-length sequences of the nucleic acid.

[0105] Typically, the nucleic acids are translated in all six frames to determine the best alignment with the individual sequences. The sequences disclosed herein in the Sequence Listing are in a 5′ to 3′ orientation and translation in three frames can be sufficient with a few specific exceptions as described in the Examples). These amino acid sequences are referred to, generally, as query sequences, which will be aligned with the individual sequences.

[0106] Nucleic acid sequences can be compared with known genes by any of the methods disclosed above. Results of individual and query sequence alignments can be divided into three categories: high similarity, weak similarity, and no similarity. Individual alignment results ranging from high similarity to weak similarity provide a basis for determining polypeptide activity and/or structure.

[0107] Parameters for categorizing individual results include: percentage of the alignment region length where the strongest alignment is found, percent sequence identity, and p value.

[0108] The percentage of the alignment region length is calculated by counting the number of residues of the individual sequence found in the region of strongest alignment. This number is divided by the total residue length of the query sequence to find a percentage. An example is shown below:

| Query sequence: | ASNPERTMIPVTRVGLIRYM |
|---|---|
| | \| \|\|\| \|\|\|\| \|\|\| |
| Individual sequence: | YMMTEYLAIPV.RVGLPRYM |
| | 1 5 10 15 |

[0109] The region of alignment begins at amino acid 9 and ends at amino acid 19. The total length of the query sequence is 20 amino acids. The percent of the alignment region length is 11/20 or 55%.

[0110] Percent sequence identity is calculated by counting the number of amino acid matches between the query and individual sequence and dividing total number of matches by the number of residues of the individual sequence found in the region of strongest alignment. For the example above, the percent identity would be 10 matches divided by 11 amino acids, or approximately 90.9%.

[0111] P value is the probability that the alignment was produced by chance. For a single alignment, the p value can be calculated according to Karlin et al., Proc. Natl. Acad. Sci. 87: 2264 (1990) and Karlin et al., Proc. Natl. Acad. Sci. 90: (1993). The p value of multiple alignments using the same query sequence can be calculated using an heuristic approach described in Altschul et al., Nat. Genet. 6: 119 (1994). Alignment programs such as BLAST program can calculate the p value.

[0112] The boundaries of the region where the sequences align can be determined according to Doolittle, Methods in Enzymology, supra; BLAST or FASTA programs; or by determining the area where the sequence identity is highest.

[0113] Another factor to consider for determining identity or similarity is the location of the similarity or identity. Strong local alignment can indicate similarity even if the length of alignment is short. Sequence identity scattered throughout the length of the query sequence also can indicate a similarity between the query and profile sequences.

### High SimilarityError! Bookmark not Defined

[0114] For the alignment results to be considered high similarity, the percent of the alignment region length, typically, is at least about 55% of total length query sequence; more typically, at least about 58%; even more typically; at least about 60% of the total residue length of the query sequence. Usually, percent length of the alignment region can be as much as about 62%; more usually, as much as about 64%; even more usually, as much as about 66%.

[0115] Further, for high similarity, the region of alignment, typically, exhibits at least about 75% of sequence identity; more typically, at least about 78%; even more typically; at least about 80% sequence identity. Usually, percent sequence identity can be as much as about 82%; more usually, as much as about 84%; even more usually, as much as about 86%.

[0116] The p value is used in conjunction with these methods. If high similarity is found, the query sequence is considered to have high similarity with a profile sequence when the p value is less than or equal to about 10⁻²; more usually; less than or equal to about 10⁻³; even more usually; less than or equal to about 10⁻⁴. More typically, the p value is no more than about 10 ⁻⁵; more typically; no more than or equal to about 10⁻³; even more typically; no more than or equal to about 10⁻¹⁵ for the query sequence to be considered high similarity.

### Weak Similarity

[0117] For the alignment results to be considered weak similarity, there is no minimum percent length of the alignment region nor minimum length of alignment. A better showing of weak similarity is considered when the region of alignment is, typically, at least about 15 amino acid residues in length; more typically, at least about 20; even more typically; at least about 25 amino acid residues in length. Usually, length of the alignment region can be as much as about 30 amino acid residues; more usually, as much as about 40; even more usually, as much as about 60 amino acid residues.

[0118] Further, for weak similarity, the region of alignment, typically, exhibits at least about 35% of sequence identity; more typically, at least about 40%; even more typically; at least about 45% sequence identity. Usually, percent sequence identity can be as much as about 50%; more usually, as much as about 55%; even more usually, as much as about 60%.

[0119] If low similarity is found, the query sequence is considered to have weak similarity with a profile sequence when the p value is usually less than or equal to about 10⁻²; more usually; less than or equal to about 10^{-3;} even more usually; less than or equal to about 10⁻⁴. More typically, the p value is no more than about 10⁻⁵; more usually; no more than or equal to about 10⁻¹⁰; even more usually; no more than or equal to about 10⁻¹⁵ for the query sequence to be considered weak similarity.

### Similarity Determined by Sequence Identity Alone Error! Bookmark not Defined.

[0120] Sequence identity alone can be used to determine similarity of a query sequence to an individual sequence and can indicate the activity of the sequence. Such an alignment, preferably, permits gaps to align sequences. Typically, the query sequence is related to the profile sequence if the sequence identity over the entire query sequence is at least about 15%; more typically, at least about 20%; even more typically, at least about 25%; even more typically, at least about 50%. Sequence identity alone as a measure of similarity is most useful when the query sequence is usually, at least 80 residues in length; more usually, 90 residues; even more usually, at least 95 amino acid residues in length. More typically, similarity can be concluded based on sequence identity alone when the query sequence is preferably 100 residues in length; more preferably, 120 residues in length; even more preferably, 150 amino acid residues in length.

### Determining Activity from Alignments with Profile and Multiple Aligned Sequences

[0121] Translations of the nucleic acids can be aligned with amino acid profiles that define either protein families or common motifs. Also, translations of the nucleic acids can be aligned to multiple sequence alignments (MSA) comprising the polypeptide sequences of members of protein families or motifs. Similarity or identity with profile sequences or MSAs can be used to determine the activity of the polypeptides encoded by nucleic acids or corresponding cDNA or genes. For example, sequences that show an identity or similarity with a chemokine profile or MSA can exhibit chemokine activities.

[0122] Profiles can designed manually by (1) creating a MSA, which is an alignment of the amino acid sequence of members that belong to the family and (2) constructing a statistical representation of the alignment Such methods are described, for example, in Birney et al., Nucl. Acid Res. 24 (14): 2730-2739 (1996).

[0123] MSAs of some protein families and motifs are publicly available. For example, these include MSAs of 547 different families and motifs. These MSAs are described also in Sonnhammer et al., Proteins 28: 405-420 (1997). Other sources are also available in the world wide web. A brief description of these MSAs is reported in Pascarella et al., Prot. Eng. 9(3): 249-251(1996).

[0124] Techniques for building profiles from MSAs are described in Sonnhammer et al., supra; Birney et al., supra; and Methods in Enzymology, vol. 266: “Computer Methods for Macromolecular Sequence Analysis,” 1996, ed. Doolittle, Academic Press, Inc., a division of Harcourt Brace & Co., San Diego, Calif., USA.

[0125] Similarity between a query sequence and a protein family or motif can be determined by (a) comparing the query sequence against the profile and/or (b) aligning the query sequence with the members of the family or motif

[0126] Typically, a program such as Searchwise can be used to compare the query sequence to the statistical representation of the multiple alignment, also known as a profile. The program is described in Birney et al., supra. Other techniques to compare the sequence and profile are described in Sonnhammer et al., supra and Doolittle, supra.

[0127] Next, methods described by Feng et al., J. Mol. Evol. 25: 351-360 (1987) and Higgins et al., CABIOS 5: 151-153 (1989) can be used align the query sequence with the members of a family or motif, also known as a MSA. Computer programs, such as PILEUP, can be used. See Feng et al., infra.

[0128] The following factors are used to determine if a similarity between a query sequence and a profile or MSA exists: (1) number of conserved residues found in the query sequence, (2) percentage of conserved residues found in the query sequence, (3) number of frameshifts, and (4) spacing between conserved residues.

[0129] Some alignment programs that both translate and align sequences can make any number of frameshifts when translating the nucleotide sequence to produce the best alignment. The fewer frameshifts needed to produce an alignment, the stronger the similarity or identity between the query and profile or MSAs. For example, a weak similarity resulting from no frameshifts can be a better indication of activity or structure of a query sequence, than a strong similarity resulting from two frameshifts. Preferably, three or fewer frameshifts are found in an alignment; more preferably two or fewer frameshifts; even more preferably, one or fewer frameshifts; even more preferably, no frameshifts are found in an alignment of query and profile or MSAs.

[0130] Conserved residues are those amino acids that are found at a particular position in all or some of the family or motif members. For example, most known chemokines contain four conserved cysteines. Alternatively, a position is considered conserved if only a certain class of amino acids is found in a particular position in all or some of the family members. For example, the N-terminal position may contain a positively charged amino acid, such as lysine, arginine, or histidine.

[0131] Typically, a residue of a polypeptide is conserved when a class of amino acids or a single amino acid is found at a particular position in at least about 40% of all class members; more typically, at least about 50%; even more typically, at least about 60% of the members. Usually, a residue is conserved when a class or single amino acid is found in at least about 70% of the members of a family or motif; more usually, at least about 80%; even more usually, at least about 90%; even more usually, at least about 95%.

[0132] A residue is considered conserved when three unrelated amino acids are found at a particular position in the some or all of the members; more usually, two unrelated amino acids. These residues are conserved when the unrelated amino acids are found at particular positions in at least about 40% of all class member; more typically, at least about 50%; even more typically, at least about 60% of the members. Usually, a residue is conserved when a class or single amino acid is found in at least about 70% of the members of a family or motif; more usually, at least about 80%; even more usually, at least about 90%; even more usually, at least about 95%.

[0133] A query sequence has similarity to a profile or MSA when the query sequence comprises at least about 25% of the conserved residues of the profile or MSA; more usually, at least about 30%; even more usually; at least about 40%. Typically, the query sequence has a stronger similarity to a profile sequence or MSA when the query sequence comprises at least about 45% of the conserved residues of the profile or MSA; more typically, at least about 50%; even more typically; at least about 55%.

[0134] V. Probes and Primers

[0135] The nucleotide sequences determined from the cloning of genes from tumor cells, especially colon cancer cell lines and tissues will further allow for the generation of probes and primers designed for identifying and/or cloning homologs in other cell types, e.g., from other tissues, as well as homologs from other mammalian organisms. Nucleotide sequences useful as probes/primers may include all or a portion of the sequences listed in SEQ ID Nos. 1-850 or sequences complementary thereto or sequences which hybridize under stringent conditions to all or a portion of SEQ ID Nos. 1-850. For instance, the present invention also provides a probe/primer comprising a substantially purified oligonucleotide, which oligonucleotide comprising a nucleotide sequence that hybridizes under stringent conditions to at least approximately 12, preferably 25, more preferably 40, 50, or 75 consecutive nucleotides up to the full length of the sense or anti-sense sequence selected from the group consisting of SEQ ID Nos. 1-850, preferably SEQ ID Nos. 1-383, even more preferably SEQ ID Nos. 1-127, or a sequence complementary thereto, or naturally occurring mutants thereof. For instance, primers based on a nucleic acid represented in SEQ ID Nos. 1-850, preferably SEQ ID Nos. 1-383, even more preferably SEQ ID Nos. 1-127, or a sequence complementary thereto, can be used in PCR reactions to clone homologs of that sequence.

[0136] In yet another embodiment, the invention provides probes/primers comprising a nucleotide sequence that hybridizes under moderately stringent conditions to at least approximately 12, 16,25,40, 50 or 75 consecutive nucleotides up to the fill length of the sense or antisense sequence selected from the group consisting of SEQ ID Nos. 1-850, preferably SEQ ID Nos. 1-383, even more preferably SEQ ID Nos. 1-127, or naturally occurring mutants thereof.

[0137] In particular, these probes are useful because they provide a method for detecting mutations in wild-type genes of the present invention. Nucleic acid probes which are complementary to a wild-type gene of the present invention and can form mismatches with mutant genes are provided, allowing for detection by enzymatic or chemical cleavage or by shifts in electrophoretic mobility.

[0138] Likewise, probes based on the subject sequences can be used to detect transcripts or genomic sequences encoding the same or homologous proteins, for use, for example, in prognostic or diagnostic assays. In preferred embodiments, the probe further comprises a label group attached thereto and able to be detected, e.g., the label group is selected from radioisotopes, fluorescent compounds, chemiluminescent compounds, enzymes, and enzyme co-factors.

[0139] Full-length cDNA molecules comprising the disclosed nucleic acids are obtained as follows, A subject nucleic acid or a portion thereof comprising at least about 12, 15, 18, or 20 nucleotides up to the full length of a sequence represented in SEQ ID Nos. 1-850, preferably SEQ ID Nos. 1-383, even more preferably SEQ ID Nos. 1-127, or a sequence complementary thereto, may be used as a hybridization probe to detect hybridizing members of a cDNA library using probe design methods, cloning methods, and clone selection techniques as described in U.S. Pat. No. 5,654,173, “Secreted Proteins and Polynucleotides Encoding Them,” incorporated herein by reference. Libraries of cDNA may be made from selected tissues, such as normal or tumor tissue, or from tissues of a mammal treated with, for example, a pharmaceutical agent. Preferably, the tissue is the same as that used to generate the nucleic acids, as both the nucleic acid and the cDNA represent expressed genes. Most preferably, the cDNA library is made from the biological material described herein in the Examples. Alternatively, many cDNA libraries are available commercially. (Sambrook et al., Molecular Cloning: A Laboratory Manual, 2nd Ed. (Cold Spring Harbor Press, Cold Spring Harbor, N.Y. 1989). The choice of cell type for library construction may be made after the identity of the protein encoded by the nucleic acid-related gene is known. This will indicate which tissue and cell types are likely to express the related gene, thereby containing the mRNA for generating the cDNA.

[0140] Members of the library that are larger than the nucleic acid, and preferably that contain the whole sequence of the native message, may be obtained. To confirm that the entire cDNA has been obtained, RNA protection experiments may be performed as follows. Hybridization of a full-length cDNA to an mRNA may protect the RNA from RNase degradation. If the cDNA is not full length, then the portions of the mRNA that are not hybridized may be subject to RNase degradation. This may be assayed, as is known in the art, by changes in electrophoretic mobility on polyacrylamide gels, or by detection of released monoribonucleotides. Sambrook et al., Molecular Cloning: A Laboratory Manual, 2nd Ed. (Cold Spring Harbor Press, Cold Spring Harbor, N.Y. 1989). In order to obtain additional sequences 5′ to the end of a partial cDNA, 5′ RACE (PCR Protocols: A Guide to Methods and Applications (Academic Press, Inc. 1990)) may be performed.

[0141] Genomic DNA may be isolated using nucleic acids in a manner similar to the isolation of full-length cDNAs. Briefly, the nucleic acids, or portions thereof, may be used as probes to libraries of genomic DNA: Preferably, the library is obtained from the cell type that was used to generate the nucleic acids. Most preferably, the genomic DNA is obtained from the biological material described herein in the Example. Such libraries may be in vectors suitable for carrying large segments of a genome, such as P1 or YAC, as described in detail in Sambrook et al., 9.4-9.30. In addition, genomic sequences can be isolated from human BAC libraries, which are commercially available from Research Genetics, Inc., Huntsville, Ala., USA, for example. In order to obtain additional 5′ or 3′ sequences, chromosome walking may be performed, as described in Sambrook et al., such that adjacent and overlapping fragments of genomic DNA are isolated. These may be mapped and pieced together, as is known in the art, using restriction digestion enzymes and DNA ligase.

[0142] Using the nucleic acids of the invention, corresponding full length genes can be isolated using both classical and PCR methods to construct and probe cDNA libraries. Using either method, Northern blots, preferably, may be performed on a number of cell types to determine which cell lines express the gene of interest at the highest rate.

[0143] Classical methods of constructing cDNA libraries are taught in Sambrook et al., supra. With these methods, cDNA can be produced from mRNA and inserted into viral or expression vectors. Typically, libraries of mRNA comprising poly(A) tails can be produced with poly(T) primers. Similarly, cDNA libraries can be produced using the instant sequences as primers.

[0144] PCR methods may be used to amplify the members of a cDNA library that comprise the desired insert. In this case, the desired insert may contain sequence from the full length cDNA that corresponds to the instant nucleic acids. Such PCR methods include gene trapping and RACE methods.

[0145] Gene trapping may entail inserting a member of a cDNA library into a vector. The vector then may be denatured to produce single stranded molecules. Next, a substrate-bound probe, such a biotinylated oligo, may be used to trap cDNA inserts of interest. Biotinylated probes can be linked to an avidin-bound solid substrate. PCR methods can be used to amplify the trapped cDNA. To trap sequences corresponding to the full length genes, the labeled probe sequence may be based on the nucleic acids of the invention, e.g., SEQ ID Nos. 1-383, preferably SEQ ID Nos. 1-127, or a sequence complementary thereto. Random primers or primers specific to the library vector can be used to amplify the trapped cDNA. Such gene trapping techniques are described in Gruber et al., PCT WO 95/04745 and Gruber et al., U.S. Pat. No. 5,500,356. Kits are commercially available to perform gene trapping experiments from, for example, Life Technologies, Gaithersburg, Md., USA.

[0146] “Rapid amplification of cDNA ends,” or RACE, is a PCR method of amplifying cDNAs from a number of different RNAs. The cDNAs may be ligated to an oligonucleotide linker and amplified by PCR using two primers. One primer may be based on sequence from the instant nucleic acids, for which full length sequence is desired, and a second primer may comprise a sequence that hybridizes to the oligonucleotide linker to amplify the cDNA. A description of this method is reported in PCT Pub. No. WO 97/19110.

[0147] In preferred embodiments of RACE, a common primer may be designed to anneal to an arbitrary adaptor sequence ligated to cDNA ends (Apte and Siebert, Biotechniques 15:890-893, 1993; Edwards et al., Nuc. Acids Res. 19:5227-5232, 1991). When a single gene-specific RACE primer is paired with the common primer, preferential amplification of sequences between the single gene specific primer and the common primer occurs. Commercial cDNA pools modified for use in RACE are available.

[0148] Another PCR-based method generates full-length cDNA library with anchored ends without specific knowledge of the cDNA sequence. The method uses lock-docking primers (I-VI), where one primer, poly TV (I-III) locks over the polyA tail of eukaryotic mRNA producing first strand synthesis and a second primer, polyGH (IV-VI) locks onto the polyC tail added by terminal deoxynucleotidyl transferase (TdT). This method is described in PCT Pub. No. WO 96/40998.

[0149] The promoter region of a gene generally is located 5′ to the initiation site for RNA polymerase II. Hundreds of promoter regions contain the “TATA” box, a sequence such as TATTA or TATAA, which is sensitive to mutations. The promoter region can be obtained by performing 5′ RACE using a primer from the coding region of the gene. Alternatively, the cDNA can be used as a probe for the genomic sequence, and the region 5′ to the coding region is identified by “walking up.”

[0150] If the gene is highly expressed or differentially expressed, the promoter from the gene may be of use in a regulatory construct for a heterologous gene.

[0151] Once the full-length cDNA or gene is obtained, DNA encoding variants can be prepared by site-directed mutagenesis, described in detail in Sambrook et al., 15.3-15.63. The choice of codon or nucleotide to be replaced can be based on the disclosure herein on optional changes in amino acids to achieve altered protein structure and/or function.

[0152] As an alternative method to obtaining DNA or RNA from a biological material, nucleic acid comprising nucleotides having the sequence of one or more nucleic acids of the invention can be synthesized. Thus, the invention encompasses nucleic acid molecules ranging in length from 12 nucleotides (corresponding to at least 12 contiguous nucleotides which hybridize under stringent conditions to or are at least 80% identical to a nucleic acid represented by one of SEQ ID Nos. 1-850, preferably SEQ ID Nos. 1-383, even more preferably SEQ ID Nos. 1-127, or a sequence complementary thereto) up to a maximum length suitable for one or more biological manipulations, including replication and expression, of the nucleic acid molecule. The invention includes but is not limited to (a) nucleic acid having the size of a full gene, and comprising at least one of SEQ ID Nos. 1-850, preferably SEQ ID Nos. 1-383, even more preferably SEQ ID Nos. 1-127, or a sequence complementary thereto; (b) the nucleic acid of (a) also comprising at least one additional gene, operably linked to permit expression of a fusion protein; (c) an expression vector comprising (a) or (b); (d) a plasmid comprising (a) or (b); and (e) a recombinant viral particle comprising (a) or (b). Construction of (a) can be accomplished as described below in part IV.

[0153] The sequence of a nucleic acid of the present invention is not limited and can be any sequence of A, T, G, and/or C (for DNA) and A, U, G, and/or C (for RNA) or modified bases thereof, including inosine and pseudouridine. The choice of sequence will depend on the desired function and can be dictated by coding regions desired, the intron-like regions desired, and the regulatory regions desired.

[0154] VI. Vectors Carrying Nucleic Acids of the Present Invention

[0155] The invention further provides plasmids and vectors, which can be used to express a gene in a host cell. The host cell may be any prokaryotic or eukaryotic cell. Thus, a nucleotide sequence derived from any one of SEQ ID Nos. 1-850, preferably SEQ ID Nos. 1-383, even more preferably SEQ ID Nos. 1-127, or a sequence complementary thereto, encoding all or a selected portion of a protein, can be used to produce a recombinant form of an polypeptide via microbial or eukaryotic cellular processes. Ligating the polynucleotide sequence into a gene construct, such as an expression vector, and transforming or transfecting into hosts, either eukaryotic (yeast, avian, insect or mammalian) or prokaryotic (bacterial cells), are standard procedures well known in the art.

[0156] Vectors that allow expression of a nucleic acid in a cell are referred to as expression vectors. Typically, expression vectors contain a nucleic acid operably linked to at least one transcriptional regulatory sequence. Regulatory sequences are art-recognized and are selected to direct expression of the subject nucleic acids. Transcriptional regulatory sequences are described in Goeddel; Gene Expression Technology: Methods in Enzymology 185, Academic Press, San Diego, Calif. (1990). In one embodiment, the expression vector includes a recombinant gene encoding a peptide having an agonistic activity of a subject polypeptide, or alternatively, encoding a peptide which is an antagonistic form of a subject polypeptide.

[0157] The choice of plasmid will depend on the type of cell in which propagation is desired and the purpose of propagation. Certain vectors are useful for amplifying and making large amounts of the desired DNA sequence. Other vectors are suitable for expression in cells in culture. Still other vectors are suitable for transfer and expression in cells in a whole animal or person. The choice of appropriate vector is well within the skill of the art. Many such vectors are available commercially. The nucleic acid or full-length gene is inserted into a vector typically by means of DNA ligase attachment to a cleaved restriction enzyme site in the vector. Alternatively, the desired nucleotide sequence may be inserted by homologous recombination in vivo. Typically this is accomplished by attaching regions of homology to the vector on the flanks of the desired nucleotide sequence. Regions of homology are added by ligation of oligonucleotides, or by polymerase chain reaction using primers comprising both the region of homology and a portion of the desired nucleotide sequence, for example.

[0158] Nucleic acids or full-length genes are linked to regulatory sequences as appropriate to obtain the desired expression properties. These may include promoters (attached either at the 5′ end of the sense strand or at the 3′ end of the antisense strand), enhancers, terminators, operators, repressors, and inducers. The promoters may be regulated or constitutive. In some situations it may be desirable to use conditionally active promoters, such as tissue-specific or developmental stage-specific promoters. These are linked to the desired nucleotide sequence using the techniques described above for linkage to vectors. Any techniques known in the art may be used.

[0159] When any of the above host cells, or other appropriate host cells or organisms, are used to replicate and/or express the polynucleotides or nucleic acids of the invention, the resulting replicated nucleic acid, RNA, expressed protein or polypeptide, is within the scope of the invention as a product of the host cell or organism. The product is recovered by any appropriate means known in the art.

[0160] Once the gene corresponding to the nucleic acid is identified, its expression can be regulated in the cell to which the gene is native. For example, an endogenous gene of a cell can be regulated by an exogenous regulatory sequence as disclosed in U.S. Pat. No. 5,641,670, “Protein Production and Protein Delivery.” A number of vectors exist for the expression of recombinant proteins in yeast (see, for example, Broach et al. (1983) in Experimental Manipulation of Gene Expression, ed. M. Inouye, Academic Press, p. 83, incorporated by reference herein). In addition, drug resistance markers such as ampicillin can be used. In an illustrative embodiment, a polypeptide is produced recombinantly utilizing an expression vector generated by sub-cloning one of the nucleic acids represented in one of SEQ ID Nos. 1-850, preferably SEQ ID Nos. 1-383, even more preferably SEQ ID Nos. 1-127, or a sequence complementary thereto.

[0161] The preferred mammalian expression vectors contain both prokaryotic sequences, to facilitate the propagation of the vector in bacteria, and one or more eukaryotic transcription units that are expressed in eukaryotic cells. The various methods employed in the preparation of plasmids and transformation of host organisms are well known in the art. For other suitable expression systems for both prokaryotic and eukaryotic cells, as well as general recombinant procedures, see Molecular Cloning: A Laboratory Manual, 2^{nd} Ed., ed. by Sambrook, Fritsch and Maniatis (Cold Spring Harbor Laboratory Press: 1989) Chapters 16 and 17. When it is desirable to express only a portion of a gene, e.g., a truncation mutant, it may be necessary to add a start codon (ATG) to the oligonucleotide fragment containing the desired sequence to be expressed. It is well known in the art that a methionine at the N-terminal position can be enzymatically cleaved by the use of the enzyme methionine aminopeptidase (MAP). MAP has been cloned from E. coli (Ben-Bassat et al. (1 987) J. Bacteriol. 169:751-757) and Salmonella typhimurium and its in vitro activity has been demonstrated on recombinant proteins (Miller et al. (1987) PNAS 84:2718-1722). Therefore, removal of an N-terminal methionine; if desired, can be achieved either in vivo by expressing polypeptides in a host which produces MAP (e.g., E. coli or CM89 or S. cerevisiae), or in vitro by use of purified MAP (e.g., procedure of Miller et al., supra).

[0162] Moreover, the nucleic acid constructs of the present invention can also be used as part of a gene therapy protocol to deliver nucleic acids such as antisense nucleic acids. Thus, another aspect of the invention features expression vectors for in vivo or in vitro transfection with an antisense oligonucleotide.

[0163] In addition to viral transfer methods, non-viral methods can also be employed to introduce a subject nucleic acid, e.g., a sequence represented by one of SEQ ID Nos. 1-850, preferably SEQ ID Nos. 1-383, even more preferably SEQ ID Nos. 1-127, or a sequence complementary thereto, into the tissue of an animal. Most non-viral methods of gene transfer rely on normal mechanisms used by mammalian cells for the uptake and intracellular transport of macromolecules. In preferred embodiments, non-viral targeting means of the present invention rely on endocytic pathways for the uptake of the subject nucleic acid by the targeted cell. Exemplary targeting means of this type include liposomal derived systems, polylysine conjugates, and artificial viral envelopes.

[0164] A nucleic acid of any of SEQ ID Nos. 1-850, preferably SEQ ID Nos. 1-383, even more preferably SEQ ID Nos. 1-127, or a sequence complementary thereto, the corresponding cDNA, or the full-length gene may be used to express the partial or complete gene product Appropriate nucleic acid constructs are purified using standard recombinant DNA techniques as described in, for example, Sambrook et al., (1989) Molecular Cloning: A Laboratory Manual, 2nd ed. (Cold Spring Harbor Press, Cold Spring Harbor, N.Y.), and under current regulations described in United States Dept. of HHS, National Institute of Health (NIH) Guidelines for Recombinant DNA Research. The polypeptides encoded by the nucleic acid may be expressed in any expression system, including, for example, bacterial, yeast, insect, amphibian and mammalian systems. Suitable vectors and host cells are described in U.S. Pat. No. 5,654,173.

[0165] Bacteria. Expression systems in bacteria include those described in Chang et al., Nature (1978) 275:615, Goeddel et al., Nature (1979) 281:544, Goeddel et al., Nucleic Acids Res. (1980) 8:4057; EP 0 036,776, U.S. Pat. No. 4,551,433, DeBoer eta al., Proc. Natl Acad Sci (USA) (1983)80:2125, and Siebenlist et al., Cell (1980) 20:269.

[0166] Yeast. Expression systems in yeast include those described in Hinnen et al., Proc. Natl. Acad Sci. (USA) (1978) 75:1929; Ito et al., J. Bacteriol. (1983) 153:163; Kurtz et al., Mol. Cell. Biol. (1986) 6:142; Kunze et al., J. Basic Microbiol. (1985) 25:141; Gleeson et al., J. Gen Microbiol. (1986) 132:3459, Roggenkamp et al., Mol. Gen. Genet. (1986)202:302) Das et al., J. Bacteriol. (1984) 158:1165; De Louvencourt et al., J. Bacteriol. (1983) 154:737, Van den Berg et al., Bio/Technology (1990) 8:135; Kunze et al., J. Basic Microbiol. (1985) 25:141; Cregg et al., Mol. Cell. Biol. (1985) 5:3376, U.S. Pat. Nos. 4,837,148 and 4,929,555; Beach and Nurse, Nature (1981) 300:706; Davidow et al., Curr. Genet. (1985) 10:380, Gaillardin et al., Curr. Genet. (1985) 10:49, Ballance et al., Biochem. Biophys. Res. Commun. (1983) 112:284289; Tilburn et al., Gene (1983) 26:205221, Yelton et al., Proc. Natl. Acad. Sci. (USA) (1984) 81:14701474, Kelly and Hynes, EMBO J. (1985) 4:475479; EP 0 244,234, and WO 91/00357.

[0167] Insect Cells. Expression of heterologous genes in insects is accomplished as described in U.S. Pat. No. 4,745,051, Friesen et al. (1986) “The Regulation of Baculovirus Gene Expression” in: The Molecular Biology Of Baculoviruses (W. Doerfler, ed.), EP 0 127,839, EP 0 155,476, and Vlak et al., J. Gen. Virol. (1988) 69:765776, Miller et al., Ann. Rev. Microbiol. (1988) 42:177, Carbonell et al., Gene (1988) 73:409, Maeda et al., Nature (1985) 315:592594, Lebacq Verheyden et al., Mol. Cell. Biol. (1988) 8:3129; Smith et al., Proc. Natl. Acad. Sci. (USA) (1985) 82:8404, Miyajima et al., Gene (1987) 58:273; and Martin et al., DNA (1988) 7:99. Numerous baculoviral strains and variants and corresponding permissive insect host cells from hosts are described in Luckow et al., Bio/Technology (1988) 6:4755, Miller et al., Generic Engineering (Setlow, J. K. et al. eds.), Vol. 8 (Plenum Publishing, 1986), pp. 277279, and Maeda et al., Nature, (1985) 315:592-594.

[0168] Mammalian Cells. Mammalian expression is accomplished as described in Dijkema et al., EMBO J. (1985) 4:761, Gorman et al., Proc. Natl. Acad Sci. (USA) (1982) 79:6777, Boshart et al., Cell (1985) 41:521 and U.S. Pat. No. 4,399,216. Other features of mammalian expression are facilitated as described in Ham and Wallace, Meth Enz. (19.79) 58:44, Barnes and Sato, Anal. Biochem. (1980) 102:255, U.S. Pat. Nos. 4,767,704, 4,657,866, 4,927,762, 4,560,655, WO 90/103430, WO 87/00195, and U.S. RE 30,985.

[0169] VII. Therapeutic Nucleic Acid Constructs

[0170] One aspect of the invention relates to the use of the isolated nucleic acid, e.g., SEQ ID Nos. 1-850, preferably SEQ ID Nos. 1-383, even more preferably SEQ ID Nos. 1-127, or a sequence complementary thereto, in antisense therapy. As used herein, antisense therapy refers to administration or in situ generation of oligonucleotide molecules or their derivatives which specifically hybridize (e.g., bind) under cellular conditions with the cellular mRNA and/or genomic DNA, thereby inhibiting transcription and/or translation of that gene. The binding may be by conventional base pair complementarity, or, for example, in the case of binding to DNA duplexes, through specific interactions in the major groove of the double helix. In general, antisense therapy refers to the range of techniques generally employed in the art, and includes any therapy which relies on specific binding to oligonucleotide sequences.

[0171] An antisense construct of the present invention can be delivered, for example, as an expression plasmid which, when transcribed in the cell, produces RNA which is complementary to at least a unique portion of the cellular mRNA. Alternatively, the antisense construct is an oligonucleotide probe which is generated ex vivo and which, when introduced into the cell, causes inhibition of expression by hybridizing with the mRNA and/or genomic sequences of a subject nucleic acid. Such oligonucleotide probes are preferably modified oligonucleotides which are resistant to endogenous nucleases, e.g., exonucleases and/or endonucleases, and are therefore stable in vivo. Exemplary nucleic acid molecules for use as antisense oligonucleotides are phosphoramidate, phosphorothioate and methylphosphonate analogs of DNA (see also U.S. Pat. Nos. 5,176,996; 5,264,564; and 5,256,775). Additionally, general approaches to constructing oligomers useful in antisense therapy have been reviewed, for example, by Van der Krol et al. (1988) BioTechniques 6:958-976; and Stein et al. (1988) Cancer Res 48:2659-2668. With respect to antisense DNA, oligodeoxyribonucleotides derived from the translation initiation site, e.g., between the −10 and +10 regions of the nucleotide sequence of interest, are preferred.

[0172] Antisense approaches involve the design of oligonucleotides (either DNA or RNA) that are complementary to mRNA. The antisense oligonucleotides will bind to the mRNA transcripts and prevent translation. Absolute complementarity, although preferred, is not required. In the case of double-stranded antisense nucleic acids, a single strand of the duplex DNA may thus be tested, or triplex formation may be assayed. The ability to hybridize will depend on both the degree of complementarity and the length of the antisense nucleic acid. Generally, the longer the hybridizing nucleic acid, the more base mismatches with an RNA it may contain and still form a stable duplex (or triplex, -as the case may be). One skilled in the art can ascertain a tolerable degree of mismatch by use of standard procedures to determine the melting point of the hybridized complex.

[0173] Oligonucleotides that are complementary to the 5′ end of the mRNA, e.g., the 5′ untranslated sequence up to and including the AUG initiation codon, should work most efficiently at inhibiting translation. However, sequences complementary to the 3′ untranslated sequences of mRNAs have recently been shown to be effective at inhibiting translation of mRNAs as well. (Wagner, R. 1994. Nature 372:333). Therefore, oligonucleotides complementary to either the 5′ or 3′ untranslated, non-coding regions of a gene could be used in an antisense approach to inhibit translation of endogenous mRNA. Oligonucleotides complementary to the 5′ untranslated region of the mRNA should include the complement of the AUG start codon; Antisense oligonucleotides complementary to mRNA coding regions are typically less efficient inhibitors of translation but could also be used in accordance with the invention. Whether designed to hybridize to the 5′, 3′, or coding region of subject mRNA, antisense nucleic acids should be at least six nucleotides in length, and are preferably less that about 100 and more preferably less than about 50, 25, 17 or 10 nucleotides in length.

[0174] Regardless of the choice of target sequence, it is preferred that in vitro studies are first performed to quantitate the ability of the antisense oligonucleotide to quantitate the ability of the antisense oligonucleotide to inhibit gene expression. It is preferred that these studies utilize controls that distinguish between antisense gene inhibition and nonspecific biological effects of oligonucleotides. It is also preferred that these studies compare levels of the target RNA or protein with that of an internal control RNA or protein. Additionally, it is envisioned that results obtained using the antisense oligonucleotide are compared with those obtained using a control oligonucleotide. It is preferred that the control oligonucleotide is of approximately the same length as the test oligonucleotide and that the nucleotide sequence of the oligonucleotide differs from the antisense sequence no more than is necessary to prevent specific hybridization to the target sequence.

[0175] The oligonucleotides can be DNA or RNA or chimeric mixtures or derivatives or modified versions thereof, single-stranded or double-stranded. The oligonucleotide can be modified at the base moiety, sugar moiety, or phosphate backbone, for example, to improve stability of the molecule, hybridization, etc. The oligonucleotide may include other appended groups such as peptides (e.g., for targeting host cell receptors), or agents facilitating transport across the cell membrane (see, e.g., Letsinger et al., 1989, Proc. Natl. Acad. Sci. U.S.A. 86:6553-6556; Lemaitre et al., 1987, Proc. Natl. Acad. Sci. 84:648-652; PCT Publication No. WO 88109810, published Dec. 15, 1988) or the blood-brain barrier (see, e.g., PCT Publication No. WO 89/10134, published Apr. 25, 1988), hybridization-triggered cleavage agents (See, e.g., Krol et al., 1988, Bio Techniques 6:958-976), or intercalating agents (See, e.g., Zon, 1988, Pharm. Res. 5:539-549). To this end, the oligonucleotide may be conjugated to another molecule, e.g., a peptide, hybridization triggered cross-linking agent, transport agent, hybridization-triggered cleavage agent, etc.

[0176] The antisense oligonucleotide may comprise at least one modified base moiety which is selected from the group including but not limited to 5-fluorouracil, 5-bromouracil, 5chlorouracil, 5-iodouracil, hypoxanthine, xantine, 4-acetylcytosine, 5-(carboxyhydroxytriethyl) uracil, 5-carboxymethylaminomethyl-2-thiouridine, 5-carboxymethylaminomethyluracil, dihydrouracil, beta-D-galactosylqueosine, inosine, N6-isopentenyladenine, 1-methylguanine, 1-methylinosine, 2,2-dimethylguanine, 2-methyladenine, 2-methylguanine, 3-methylcytosine, 5-methylcytosine, N6-adenine, 7-methylguanine, 5-methylaminomethyluracil, 5-methoxyaminomethyl-2-thiouracil, beta-D-mannosylqueosine, 5′-methoxycarboxymethyluracil, 5-methoxyuracil, 2-methylthio-N6-isopentenyladenine, uracil-5-oxyacetic acid (v), wybutoxosine, pseudouracil, queosine, 2-thiocytosine, 5-methyl-2-thiouracil, 2-thiouracil, 4-thiouracil, 5-methyluracil, uracil-5-oxyacetic acid methylester, uracil-5-oxyacetic acid (v), 5-methyl-2-thiouracil, 3-(3-amino-3-N-2-carboxypropyl) uracil, (acp3)w, and 2,6-diaminopurine.

[0177] The antisense oligonucleotide may also comprise at least one modified sugar moiety selected from the group including but not limited to arabinose, 2-fluoroarabinose, xylulose, and hexose.

[0178] The antisense oligonucleotide can also contain a neutral peptide-like backbone. Such molecules are termed peptide nucleic acid (PNA)-oligomers and are described, e.g., in Perry-O'Keefe et al. (1996) Proc. Natl. Acad. Sci. U.S.A. 93-:14670 and in Eglom et al. (1993) Nature 365:566. One advantage of PNA oligomers is their capability to bind to complementary DNA essentially independently from the ionic strength of the medium due to the neutral backbone of the DNA. In yet another embodiment, the antisense oligonucleotide comprises at least one modified phosphate backbone selected from the group consisting of a phosphorothioate, a phosphorodithioate, a phosphoramidothioate, a phosphoramidate, a phosphordiamidate, a methylphosphonate, an alkyl phosphotriester, and a formacetal or analog thereof.

[0179] In yet a further embodiment, the antisense oligonucleotide is an α-anomeric oligonucleotide. An α-anomeric oligonucleotide forms specific double-stranded hybrids with complementary RNA in which, contrary to the usual β-units, the strands run parallel to each other (Gautier et al., 1987, Nucl. Acids Res. 15:6625-6641). The oligonucleotide is a 2′-O-methylribonucleotide (Inoue et al., 1987, Nucl. Acids Res. 15:6131-12148), or a chimeric RNA-DNA analogue (Inoue et al., 1987, FEBS Lett. 215:327-330).

[0180] Oligonucleotides of the invention may be synthesized by standard methods known in the art, e.g., by use of an automated DNA synthesizer (such as are commercially available from Biosearch, Applied Biosystems, etc.). As examples, phosphorothioate oligonucleotides may be synthesized by the method of Stein et al. (1988, Nucl. Acids Res. 16:3209), methylphosphonate olgonucleotides can be prepared by use of controlled pore glass polymer supports (Sarin et al., 1988, Proc. Natl. Acad. Sci. U.S.A. 85:7448-7451), etc.

[0181] While antisense nucleotides complementary to a coding region sequence can be used, those complementary to the transcribed untranslated region and to the region comprising the initiating methionine are most preferred.

[0182] The antisense molecules can be delivered to cells which express the target nucleic acid in vivo. A number of methods have been developed for delivering antisense DNA or RNA to cells; e.g., antisense molecules can be injected directly into the tissue site, or modified antisense molecules, designed to target the desired cells (e.g., antisense linked to peptides or antibodies that specifically bind receptors or antigens expressed on the target cell surface) can be administered systemically.

[0183] However, it is often difficult to achieve intracellular concentrations of the antisense sufficient to suppress translation on endogenous mRNAs. Therefore, a preferred approach utilizes a recombinant DNA construct in which the antisense oligonucleotide is placed under the control of a strong pol III or pol II promoter. The use of such a construct to transfect target cells in the patient will result in the transcription of sufficient amounts of single stranded RNAs that will form complementary base pairs with the endogenous transcripts and thereby prevent translation of the target mRNA. For example, a vector can be introduced in vivo such that it is taken up by a cell and directs the transcription of an antisense RNA. Such a vector can remain episomal or become chromosomally integrated, as long as it can be transcribed to produce the desired antisense RNA. Such vectors can be constructed by recombinant DNA technology methods standard in the art. Vectors can be plasmid, viral, or others known in the art for replication and expression in mammalian cells. Expression of the sequence encoding the antisense RNA can be by any promoter known in the art to act in mammalian, preferably human cells. Such promoters can be inducible or constitutive. Such promoters include but are not limited to: the SV40 early promoter region (Bernoist and Chambon, 1981, Nature 290:304-310), the promoter contained in the 3′ long terminal repeat of Rous sarcoma virus (Yamamoto et al., 1980, Cell 22:787-797), the herpes thymidine kinase promoter (Wagner et al., 1981, Proc. Natl. Acad. Sci. U.S.A. 78:1441-1445), the regulatory sequences of the metallothionein gene (Brinster et al, 1982, Nature 296:3942), etc. Any type of plasmid, cosmid, YAC or viral vector can be used to prepare the recombinant DNA construct which can be introduced directly into the tissue site; e.g., the choroid plexus or hypothalamus. Alternatively, viral vectors can be used which selectively infect the desired tissue (e.g., for brain, herpesvirus vectors may be used), in which case administration may be accomplished by another route (e.g., systemically).

[0184] In another aspect of the invention, ribozyme molecules designed to catalytically cleave target mRNA transcripts can be used to prevent translation of target mRNA and expression of a target protein (See, e.g., PCT International Publication WO90/11364, published Oct. 4, 1990; Sarver et al., 1990, Science 247:1222-1225 and U.S. Pat. No. 5,093,246). While ribozymes that cleave mRNA at site specific recognition sequences can be used to destroy target mRNAs, the use of hammerhead ribozymes is preferred. Hammerhead ribozymes cleave mRNAs at locations dictated by flanking regions that form complementary base pairs with the target mRNA. The sole requirement is that the target mRNA have the following sequence of two bases: 5′-UG-3′. The construction and production of hammerhead ribozymes is well known in the art and is described more fully in Haseloff and Gerlach, 1988, Nature, 334:585-591. Preferably the ribozyme is engineered so that the cleavage recognition site is located near the 5′ end of the target mRNA; i.e., to increase efficiency and minimize the intracellular accumulation of non-functional mRNA transcripts.

[0185] The ribozymes of the present invention also include RNA endoribonucleases (hereinafter “Cech-type ribozymes”) such as the one which occurs naturally in Tetrahymena thermophila (known as the IVS, or L-19 IVS RNA) and which has been extensively described by Thomas Cech and collaborators (Zaug, et al., 1984, Science, 224:574-578; Zaug and Cech, 1986, Science, 231:470-475; Zaug, et al., 1986, Nature, 324:429433; published International patent application No. W088/04300 by University Patents Inc.; Been and Cech, 1986, Cell, 47:207-216). The Cech-type ribozymes have an eight base pair active site which hybridizes to a target RNA sequence whereafter cleavage of the target RNA takes place. The invention encompasses those Cech-type ribozymes which target eight base-pair active site sequences that are present in a target gene.

[0186] As in the antisense approach, the ribozymes can be composed of modified oligonucleotides (e.g., for improved stability, targeting, etc.) and should be delivered to cells which express the target gene in vivo. A preferred method of delivery involves using a DNA construct “encoding” the ribozyme under the control of a strong constitutive pol III or pol II promoter, so that transfected cells will produce sufficient quantities of the ribozyme to destroy endogenous messages and inhibit translation. Because ribozymes, unlike antisense molecules, are catalytic, a lower intracellular concentration is required for efficiency.

[0187] Antisense RNA, DNA, and ribozyme molecules of the invention may be prepared by any method known in the art for the synthesis of DNA and RNA molecules. These include techniques for chemically synthesizing oligodeoxyribonucleotides and oligoribonucleotides well known in the art such as for example solid phase phosphoramidite chemical synthesis. Alternatively, RNA molecules may be generated by in vitro and in vivo transcription of DNA sequences encoding the antisense RNA molecule. Such DNA sequences may be incorporated into a wide variety of vectors which incorporate suitable RNA polymerase promoters such as the T7 or SP6 polymerase promoters. Alternatively, antisense cDNA constructs that synthesize antisense RNA constitutively or inducibly, depending on the promoter used, can be introduced stably into cell lines.

[0188] Moreover, various well-known modifications to nucleic acid molecules may be introduced as a means of increasing intracellular stability and half-life. Possible modifications include but are not limited to the addition of flanking sequences of ribonucleotides or deoxyribonucleotides to the 5′ and/or 3′ ends of the molecule or the use of phosphorothioate or 2′ O-methyl rather than phosphodiesterase linkages within the oligodeoxyribonucleotide backbone.

[0189] VIII. Polypeptides of the Present Invention

[0190] The present invention makes available isolated polypeptides which are isolated from, or otherwise substantially free of other cellular proteins, especially other signal transduction factors and/or transcription factors which may normally be associated with the polypeptide. Subject polypeptides of the present invention include polypeptides encoded by the nucleic acids of SEQ ID Nos. 1-850, preferably SEQ ID Nos. 1-383, even more preferably SEQ ID Nos. 1-127, or a sequence complementary thereto, or polypeptides encoded by genes of which a sequence in SEQ ID Nos. 1-850, preferably SEQ ID Nos. 1-383, even more preferably SEQ ID Nos. 1-127, or a sequence complementary thereto, is a fragment. Polypeptides of the present invention include those proteins which are differentially regulated in tumor cells, especially colon cancer-derived cell lines (relative to normal cells, e.g., normal colon tissue and non-colon tissue). In preferred embodiments, the polypeptides are upregulated in tumor cells, especially colon cancer cancer-derived cell lines. In other embodiments, the polypeptides are downregulated in tumor cells, especially colon cancer-derived cell lines. Proteins which are upregulated, such as oncogenes, or downregulated, such as tumor suppressors, in aberrantly proliferating cells may be targets for diagnostic or therapeutic techniques. For example, upregulation of the cdc2 gene induces mitosis. Overexpression of the myt1gene, a mitotic deactivator, negatively regulates the activity of cdc2. Aberrant proliferation may thus be induced either by upregulating cdc2 or by downregulating myt1

[0191] The term “substantially free of other cellular proteins” (also referred to herein as “contaminating proteins”) or “substantially pure or purified preparations” are defined as encompassing preparations of polypeptides having less than about 20% (by dry weight) contaminating protein, and preferably having less than about 5% contaminating protein. Functional forms of the subject polypeptides can be prepared, for the first time, as purified preparations by using a cloned nucleic acid as described herein. Full length proteins or fragments corresponding to one or more particular motifs and/or domains or to arbitrary sizes, for example, at least about 5, 10, 25, 50, 75, or 100 amino acids in length are within the scope of the present invention.

[0192] For example, isolated polypeptides can be encoded by all or a portion of a nucleic acid sequence shown in any of SEQ ID Nos. 1-850, preferably SEQ ID Nos. 1-383, even more preferably SEQ ID Nos. 1-127, or a sequence complementary thereto. Isolated peptidyl portions of proteins can be obtained by screening peptides recombinantly produced from the corresponding fragment of the nucleic acid encoding such peptides. In addition, fragments can be chemically synthesized using techniques known in the art such as conventional Merrifield solid phase f-Moc or t-Boc chemistry. For example, a polypeptide of the present invention may be arbitrarily divided into fragments of desired length with no overlap of the fragments, or preferably divided into overlapping fragments of a desired length. The fragments can be produced (recombinantly or by chemical synthesis) and tested to identify those peptidyl fragments which can function as either agonists or antagonists of a wild-type (e.g., “authentic”) protein.

[0193] Another aspect of the present invention concerns recombinant forms of the subject proteins. Recombinant polypeptides preferred by the present invention, in addition to native proteins as described above are encoded by a nucleic acid, which is at least 60%, more preferably at least 80%, and more preferably 85%, and more preferably 90%, and more preferably 95% identical to an amino acid sequence encoded by SEQ ID NOs. 1-850. Polypeptides which are encoded by a nucleic acid that is at least about 98-99% identical with the sequence of SEQ ID Nos. 1-850 are also within the scope of the invention. Also included in the present invention are peptide fragments comprising at least a portion of such a protein.

[0194] In a preferred embodiment, a polypeptide of the present invention is a mammalian polypeptide and even more preferably a human polypeptide. In particularly preferred embodiment, the polypeptide retains wild-type bioactivity. It will be understood that certain post-translational modifications, e.g., phosphorylation and the like, can increase the apparent molecular weight of the polypeptide relative to the unmodified polypeptide chain.

[0195] The present invention further pertains to recombinant forms of one of the subject polypeptides. Such recombinant polypeptides preferably are capable of functioning in one of either role of an agonist or antagonist of at least one biological activity of a wild-type (“authentic”) polypeptide of the appended sequence listing. The term “evolutionarily related to”, with respect to amino acid sequences of proteins, refers to both polypeptides having amino acid sequences which have arisen naturally, and also to mutational variants of human polypeptides which are derived, for example, by combinatorial mutagenesis.

[0196] In general, polypeptides referred to herein as having an activity (e.g., are “bioactive”) of a protein are defined as polypeptides which include an amino acid sequence encoded by all or a portion of the nucleic acid sequences shown in one of SEQ ID Nos. 1-850, preferably SEQ ID Nos. 1-383, even more preferably SEQ ID Nos. 1-127, or a sequence complementary thereto, and which mimic or antagonize all or a portion of the biological/biochemical activities of a naturally occurring protein. According to the present invention, a polypeptide has biological activity if it is a specific agonist or antagonist of a naturally occurring form of a protein.

[0197] Assays for determining whether a compound, e.g., a protein or variant thereof, has one or more of the above biological activities are well known in the art. In certain embodiments, the polypeptides of the present invention have activities such as those outlined above.

[0198] In another embodiment, the coding sequences for the polypeptide can be incorporated as a part of a fusion gene including a nucleotide sequence encoding a different polypeptide. This type of expression system can be useful under conditions where it is desirable to produce an immunogenic fragment of a polypeptide (see, for example, EP Publication No: 0259149; and Evans et al. (1989) Nature 339:385; Huang et al. (1988) J. Virol. 62:3855; and Schlienger et al. (1992) J. Virol. 66:2). In addition to utilizing fusion proteins to enhance immunogenicity, it is widely appreciated that fusion proteins can also facilitate the expression of proteins, and, accordingly, can be used in the expression of the polypeptides of the present invention (see, for example, Current Protocols in Molecular Biology, eds. Ausubel et al. (N.Y.: John Wiley & Sons, 1991)). In another embodiment, a fusion gene coding for a purification leader sequence, such as a poly-(His)/enterokinase cleavage site sequence at the N-terminus of the desired portion of the recombinant protein, can allow purification of the expressed fusion protein by affinity chromatography using a Ni²⁺ metal resin. The purification leader sequence can then be subsequently removed by treatment with enterokinase to provide the purified protein (e.g., see Hochuli et al. (1987) J. Chromatography 411:177; and Janknecht et al. PNAS 88:8972).

[0199] Techniques for making fusion genes are known to those skilled in the art. Essentially, the joining of various DNA fragments coding for different polypeptide sequences is performed in accordance with conventional techniques, employing blunt-ended or stagger-ended termini for ligation, restriction enzyme digestion to provide for appropriate termini, filling-in of cohesive ends as appropriate, alkaline phosphatase treatment to avoid undesirable joining, and enzymatic ligation. In another embodiment, the fusion gene can be synthesized by conventional techniques including automated DNA synthesizers. Alternatively, PCR amplification of nucleic acid fragments can be carried out using anchor primers which give rise to complementary overhangs between two consecutive nucleic acid fragments which can subsequently be annealed to generate a chimeric nucleic acid sequence (see, for example, Current Protocols in Molecular Biology, eds. Ausubel et al. John Wiley & Sons: 1992).

[0200] The present invention further pertains to methods of producing the subject polypeptides. For example, a host cell transfected with a nucleic acid vector directing expression of a nucleotide sequence encoding the subject polypeptides can be cultured under appropriate conditions to allow expression of the peptide to occur. Suitable media for cell culture are well known in the art. The recombinant polypeptide can be isolated from cell culture medium, host cells, or both using techniques known in the art for purifying proteins including ion-exchange chromatography, gel filtration chromatography, ultrafiltration, electrophoresis, and immunoaffinity purification with antibodies specific for such peptide. In a preferred embodiment, the recombinant polypeptide is a fusion protein containing a domain which facilitates its purification, such as GST fusion protein.

[0201] Moreover, it will be generally appreciated that, under certain circumstances, it may be advantageous to provide homologs of one of the subject polypeptides which function in a limited capacity as one of either an agonist (mimetic) or an antagonist, in order to promote or inhibit only a subset of the biological activities of the naturally occurring form of the protein. Thus, specific biological effects can be elicited by treatment with a homolog of limited function, and with fewer side effects relative to treatment with agonists or antagonists which are directed to all of the biological activities of naturally occurring forms of subject proteins.

[0202] Homologs of each of the subject polypeptide can be generated by mutagenesis, such as by discrete point mutation(s), or by truncation. For instance, mutation can give rise to homologs which retain substantially the same, or merely a subset, of the biological activity of the polypeptide from which it was derived. Alternatively; antagonistic forms of the polypeptide can be generated which are able to inhibit the function of the naturally occurring form of the protein, such as by competitively binding to a receptor.

[0203] The recombinant polypeptides of the present invention also include homologs of the wild-type proteins, such as versions of those proteins which are resistant to proteolytic cleavage, for example, due to mutations which alter ubiquitination or other enzymatic targeting associated with the protein.

[0204] Polypeptides may also be chemically modified to create derivatives by forming covalent or aggregate conjugates with other chemical moieties, such as glycosyl groups, lipids, phosphate, acetyl groups and the like. Covalent derivatives of proteins can be prepared by linking the chemical moieties to functional groups on amino acid sidechains of the protein or at the N-terminus or at the C-terminus of the polypeptide.

[0205] Modification of the structure of the subject polypeptides can be for such purposes as enhancing therapeutic or prophylactic efficacy, stability (e.g., ex vivo shelf life and resistance to proteolytic degradation), or post-translational modifications (e.g., to alter phosphorylation pattern of protein). Such modified peptides, when designed to retain at least one activity of the naturally occurring form of the protein, or to produce specific antagonists thereof, are considered functional equivalents of the polypeptides described in more detail herein. Such modified peptides can be produced, for instance, by amino acid substitution, deletion, or addition. The substitutional variant may be a substituted conserved amino acid or a substituted non-conserved amino acid.

[0206] For example, it is reasonable to expect that an isolated replacement of a leucine with an isoleucine or valine, an aspartate with a glutamate, a threonine with a serine, or a similar replacement of an amino acid with a structurally related amino acid (i.e., isosteric and/or isoelectric mutations) will not have a major effect on the biological activity of the resulting molecule. Conservative replacements are those that take place within a family of amino acids that are related in their side chains. Genetically encoded amino acids can be divided into four families: (1) acidic=aspartate, glutamate; (2) basic=lysine, arginine, histidine; (3) nonpolar =alanine, valine, leucine, isoleucine, proline, phenylalanine, methionine, tryptophan; and (4) uncharged polar=glycine, asparagine, glutamine, cysteine, serine, threonine, tyrosine. In similar fashion, the amino acid repertoire can be grouped as (1) acidic=aspartate, glutamate; (2) basic=lysine, arginine histidine, (3) aliphatic=glycine, alanine, valine, leucine, isoleucine, serine, threonine, with serine and threonine optionally be grouped separately as aliphatic-hydroxyl; (4) aromatic=phenylalanine, tyrosine, tryptophan; (5) amide=asparagine, glutamine; and (6) sulfur -containing=cysteine and methionine. (see, for example, Biochemistry, 2^{nd} ed., Ed. by L. Stryer, WH Freeman and Co.: 1981). Whether a change in the amino acid sequence of a peptide results in a functional homolog (e.g., functional in the sense that the resulting polypeptide mimics or antagonizes the wild-type form) can be readily determined by assessing the ability of the variant peptide to produce a response in cells in a fashion similar to the wild-type protein, or competitively inhibit such a response. Polypeptides in which more than one replacement has taken place can readily be tested in the same manner. The variant may be designed so as to retain biological activity of a particular region of the protein. In a non-limiting example, Osawa et al., 1994, Biochemistry and Molecular International 34:1003-1009, discusses the actin binding region of a protein from several different species. The actin binding regions of the these species are considered homologous based on the fact that they have amino acids that fall within “homologous residue groups.” Homologous residues are judged according to the following groups (using single letter amino acid designations): STAG; ILVMF; HRK; DEQN; and FYW. For example, an S, a T, an A or a G can be in a position and the function (in this case actin binding) is retained.

[0207] Additional guidance on amino acid substitution is available from studies of protein evolution. Go et al., 1980, Int. J. Peptide Protein Res. 15:211-224, classified amino acid residue sites as interior or exterior depending on their accessibility. More frequent substitution on exterior sites was confirmed to be general in eight sets of homologous protein families regardless of their biological functions and the presence or absence of a prosthetic group. Virtually all types of amino acid residues had higher mutabilities on the exterior than in the interior. No correlation between mutability and polarity was observed of amino acid residues in the interior and exterior, respectively. Amino acid residues were classified into one of three groups depending on their polarity: polar (Arg, Lys, His, Gln, Asn, Asp, and Glu); weak polar (Ala, Pro, Gly, Thr, and Ser), and nonpolar (Cys, Val, Met, Ile, Leu, Phe, Tyr, and Trp). Amino acid replacements during protein evolution were very conservative: 88% and 76% of them in the interior or exterior, respectively, were within the same group of the three. Inter-group replacements are such that weak polar residues are replaced more often by nonpolar residues in the interior and more often by polar residues on the exterior.

[0208] Querol et al. 1996, Prot. Eng. 9:265-271, provides general rules for amino acid substitutions to enhance protein thermostability. New glycosylation sites can be introduced as discussed in Olsen and Thomsen, 1991, J. Gen. Microbiol. 137:579-585. An additional disulfide bridge can be introduced, as discussed by Perry and Wetzel, 1984, Science 226:555-557; Pantoliano et al., 1987, Biochemistry 26:2077-2082; Matsumura et al., 1989, Nature 342:291-293; Nishikawa et al., 1990, Protein Eng. 3:443-448; Takagi et al., 1990, J. Biol. Chem. 265:6874-6878; Clarke et al., 1993, Biochemistry 32:4322-4329; and Wakarchuk et al., 1994, Protein Eng. 7:1379-1386.

[0209] An additional metal binding site can be introduced, according to Toma et al., 1991, Biochemistry 30:97-106, and Haezerbrouck et al. 1993, Protein Eng. 6:643-649. Substitutions with prolines in loops can be made according to Masul et al., 1994, Appl. Env. Microbiol. 60:3579-3584; and Hardy et al., FEBS Lett. 317:89-92.

[0210] Cysteine-depleted muteins are considered variants within the scope of the invention. These variants can be constructed according to methods disclosed in U.S. Pat. No. 4,959,314, which discloses how to substitute other amino acids for cysteines, and how to determine biological activity and effect of the substitution. Such methods are suitable for proteins according to this invention that have cysteine residues suitable for such substitutions, for example to eliminate disulfide bond formation.

[0211] To learn the identity and function of the gene that correlates with an nucleic acid, the nucleic acids or corresponding amino acid sequences can be screened against profiles of protein families. Such profiles focus on common structural motifs among proteins of each family. Publicly available profiles are described above. Additional or alternative profiles are described below.

[0212] In comparing a new nucleic acid with known sequences, several alignment tools are available. Examples include PileUp, which creates a multiple sequence alignment, and is described in Feng et al., J. Mol. Evol. (1987) 25:351-360. Another method, GAP, uses the alignment method of Needleman et al., J. Mol. Biol. (1 970) 48:443-453. GAP is best suited for global alignment of sequences. A third method, BestFit, functions by inserting gaps to maximize the number of matches using the local homology algorithm of Smith and Waterman, Adv. Appl. Math. (1981) 2:482-489.

[0213] Examples of such profiles are described below.

### Chemokines

[0214] Chemokines are a family of proteins that have been implicated in lymphocyte trafficking, inflammatory diseases, angiogenesis, hematopoiesis, and viral infection. See, for example, Rollins, Blood (1997) 90(3):909-928, and Wells et al., J. Leuk Biol. (1997) 61:545-550. U.S. Pat. No. 5,605,817 discloses DNA encoding a chemokine expressed in fetal spleen. U.S. Pat. No. 5,656,724 discloses chemokine-like proteins and methods of use. U.S. Pat. No. 5,602,008 discloses DNA encoding a chemokine expressed by liver.

[0215] Mutants of the encoded chemokines are polypeptides having an amino acid sequence that possesses at least one amino acid substitution, addition, or deletion as compared to native chemokines. Fragments possess the same amino acid sequence of the native chemokines; mutants may lack the amino and/or carboxyl terminal sequences. Fusions are mutants, fragments, or the native chemokines that also include amino and/or carboxyl terminal amino acid extensions.

[0216] The number or type of the amino acid changes is not critical, nor is the length or number of the amino acid deletions, or amino acid extensions that are incorporated in the chemokines as compared to the native chemokine amino acid sequences. A polynucleotide encoding one of these variant polypeptides will retain at least about 80% amino acid identity with at least one known chemokine. Preferably, these polypeptides will retain at least about 85% amino acid sequence identity, more preferably, at least about 90%; even more preferably, at least about 95%. In addition, the variants will exhibit at least 80%; preferably about 90%; more preferably about 95% of at least one activity exhibited by a native chemokine. Chemokine activity includes immunological, biological, receptor binding, and signal transduction functions of the native chemokine.

[0217] Chemotaxis. Assays for chemotaxis relating to neutrophils are described in Walz et al., Biochem. Biophys. Res. Commun. (1987) 149:755, Yoshimura et al., Proc. Natl. Acad Sci. (USA) (1987) 84:9233, and Schroder et al., J. Immunol. (1987) 139:3474; to lymphocytes, Larsen et al., Science (1989) 243:1464, Carr et al., Proc. Natl. Acad Sci. (USA) (1994) 91:3652; to tumor-infiltrating lymphocytes, Liao et al., J. Exp. Med (1995). 182:1301; to hemopoietic progenitors, Aiuti et al., J. Exp. Med (1997) 185:111; to monocytes, Valente et al., Biochem. (1988) 27:4162; and to natural killer cells, Loetscher et al., J. Immunol. (1996) 156:322, and Allavena et al., Eur. J. Immunol. (1994) 24:3233.

[0218] Assays for determining the biological activity of attracting eosinophils are described in Dahinden et al., J. Exp. Med. (1994) 179:751, Weber et al., J. Immunol (1995) 154:4166, and Noso et al., Biochem. Biophys. Res. Commun. (1994) 200:1470; for attracting dendritic cells, Sozzai et al., J. Immunol. (1995) 155:3292; for attracting basophils, in Dahinden et al., J. Exp. Med (1994) 179:751, Alam et al., J Immunol. (1994) 152:1298, Alam et al., J. Exp. Med. (1992) 176:781; and for activating neutrophils, Maghazaci et al., Eur. J. Immunol. (1996) 26:315, and Taub et al., J. Immunol. (1995) 155:3877. Native chemokines can act as mitogens for fibroblasts, assayed as described in Mullenbach et al., J. Biol. Chem. (1986) 261:719.

[0219] Receptor Binding. Native chemokines exhibit binding activity with a number of receptors. Description of such receptors and assays to detect binding are described in, for example, Murphy et al., Science (1991) 253:1280; Combadiere et al., J. Biol. Chem. (1995) 270:29671; Daugherty et al., J. Exp. Med (1996) 183:2349; Samson et al., Biochem. (1996) 35:3362; Raport et al., J. Biol. Chem. (1996) 271:17161; Combadiere et al., J. Leukoc. Biol. (1996) 60:147; Baba et al., J. Biol. Chem. (1997) 23:14893; Yosida et al., J. Biol. Chem. (1997) 272:13803; Arvannitakis et al., Nature (1997) 385:347, and many other assays are known in the art.

[0220] Kinase Activiation. Assays for kinase activation are described by Yen et al., J. Leukoc. Biol. (1997) 61:529; Dubois et al., J. Immunol. (1996) 156:1356; Turner et al., J. Immunol. (1995) 155:2437. Assays for inhibition of angiogenesis or cell proliferation are described in Maione et al., Science (1990) 247:77. Glycosaminoglycan production can be induced by native chemokines, assayed as described in Castor et al., Proc. Natl. Acad. Sci. (USA) (1983) 80:765. Chemokine-mediated histamine release from basophils is assayed as described in Dahinden et al., J. Exp. Med (1989) 170:1787; and White et al., Immunol. Lett. (1989) 22:151. Heparin binding is described in Luster et al., J. Exp. Med (1995) 182:219.

[0221] Dimerization Activity. Chemokines can possess dimerization activity, which can be assayed according to Burrows et al., Biochem. (1994) 33:12741; and Zhang et al., Mol. Cell. Biol. (1995) 15:4851. Native chemokines can play a role in the inflammatory response of viruses. This activity can be assayed as described in Bleul et al., Nature (1996) 382:829; and Oberlin et al., Nature (1996) 382:833. Exocytosis of monocytes can be promoted by native chemokines. The assay for such activity is described in Uguccioni et al., Eur. J. Immunol. (1995) 25:64. Native chemokines also can inhibit hemapoietic stem cell proliferation. The method for testing for such activity is reported in Graham et al., Nature (1990) 344:442.

### Death Domain Proteins

[0222] Several protein families contain death domain motifs (Feinstein and Kimchi, TIBS Letters (1995) 20:242-244). Some death domain-containing proteins are implicated in cytotoxic intracellular signaling (Cleveland and Ihle, Cell (1995) 81:479482, Pan et al, Science (1997) 276:111-113, Duan and Dixit, Nature (1997) 385:86-89, and Chinnaiyan et al, Science (1996) 274:990-992). U.S. Pat. No. 5,563,039 describes a protein homologous to TRADD (Tumor Necrosis Factor Receptor-1 Associated Death Domain containing protein), and modifications of the active domain of TRADD that retain the functional characteristics of the protein, as well as apoptosis assays for testing the function of such death domain containing proteins. U.S. Pat. No. 5,658,883 discloses biologically active TGF-B1 peptides. U.S. Pat. No. 5,674,734 discloses protein RIP which contains a C-terminal death domain and an N-terminal kinase domain.

### Leukemia Inhibitory Factor (LIF)

[0223] An LIF profile is constructed from sequences of leukemia inhibitor factor, CT-1 (cardiotrophin-1), CNTF (ciliary neurotrophic factor), OSM (oncostatin M), and IL-6 (interleukin-6). This profile encompasses a family of secreted cytokines that have pleiotropic effects on many cell types including hepatocytes, osteoclasts, neuronal cells and cardiac myocytes, and can be used to detect additional genes encoding such proteins. These molecules are all structurally related and share a common co-receptor gp130 which mediates intracellular signal transduction by cytoplasmic tyrosine kinases such as src.

[0224] Novel proteins related to this family are also likely to be secreted, to activate gp130 and to function in the development of a variety of cell types. Thus new members of this family would be candidates to be developed as growth or survival factors for the cell types that they stimulate. For more details on this family of cytokines, see Pennica et al, Cytokine and Growth Factor Reviews (1996) 7:81-91. U.S. Pat. No. 5,420,247 discloses LIF receptor and fusion proteins. U.S. Pat. No. 5,443,825 discloses human LIF.

### Angiopoietin

[0225] Angiopoietin-1 is a secreted ligand of the TIE-2 tyrosine kinase; it functions as an angiogenic factor critical for normal vascular development. Angiopoietin-2 is a natural antagonist of angiopoietin-1 and thus functions as an anti-angiogenic factor. These two proteins are structurally similar and activate the same receptor. (Folkman and D'Amore, Cell (1996) 87:1153-1155, and Davis et al., Cell (1996) 87:1161-1169.)

[0226] The angiopoietin molecules are composed of two domains, a coiled-coil region and a region related to fibrinogen. The fibrinogen domain is found in many molecules including ficolin and tesascin, and is well defined structurally with many members.

### Receptor Protein-Tyrosine Kinases

[0227] Receptor Protein-Tyrosine Kinases or RPTKs are described in Lindberg Annu. Rev. Cell Biol. (1994) 10;251-337.

### Growth Factors: Epidermal Growth Factor (EGF) and Fibroblast Growth Factor (FGF)

[0228] For a discussion of growth factor superfamilies, see Growth Factors: A Practical Approach, Appendix A1 (Ed. McKay and Leigh, Oxford University Press, NY, 1993) pp. 237-243.

[0229] The alignments (pretty box) for EGF and FGF are shown in FIGS. 1 and 2, respectively. U.S. Pat. No. 4,444,760 discloses acidic brain fibroblast growth factor, which is active in the promotion of cell division and wound healing. U.S. Pat. No. 5,439,818 discloses DNA encoding human recombinant basic fibroblast growth factor, which is active in wound healing. U.S. Pat. No. 5,604,293 discloses recombinant human basic fibroblast growth factor, which is useful for wound healing. U.S. Pat. No. 5,410,832 discloses brain-derived and recombinant acidic fibroblast growth factor, which act as mitogens for mesoderm and neuroectoderm-derived cells in culture, and promote wound healing in soft tissue, cartilaginous tissue and musculo-skeletal tissue. U.S. Pat. No. 5,387,673 discloses biologically active fragments of FGF that retain activity.

### Proteins of the TNF Family

[0230] A profile derived from the TNF family is created by aligning sequences of the following TNF family members: nerve growth factor (NGF), lymphotoxin, Fas ligand, tumor necrosis factor (TNF), CD40 ligand, TRAIL, ox40 ligand, 4-1BB ligand, CD27 ligand, and CD30 ligand. The profile is designed to identify sequences of proteins that constitute new members or homologues of this family of proteins.

[0231] U.S. Pat. No. 5,606,023 discloses mutant TNF proteins; U.S. Pat. No. 5,597,899 and U.S. Pat. No. 5,486,463 disclose TNF muteins; and U.S. Pat. No. 5,652,353 discloses DNA encoding TNFα muteins.

[0232] Members of the TNF family of proteins have been show in vitro to multimerize, as described in Burrows et al., Biochem (1994) 33:12741 and Zhang et al., Mol. Cell. Biol. (1995) 154851 and bind receptors as described in Browning et al., J. Immunol. (1994) 147:1230, Androlewicz et al., J. Biol. Chem. (1992) 267:2542, and Crowe et al., Science (1994) 264:707.

[0233] In vivo, TNFs proteolytically cleave a target protein as described in Kriegel et al., Cell (1988) 53:45 and Mohler et al., Nature (1994) 370:218 and demonstrate cell proliferation and differentiation activity. T-cell or thymocyte proliferation is assayed as described in Armitage et al., Eur. J. Immunol. (1992) 22:447; Current Protocols in Immunology, ed. J. E. Coligan et al., 3.1-3.19; Takai et al., J. Immunol. (1986) 137:3494-3500, Bertagnoli et al., J. Immunol. (1990) 145:1706-1712, Bertagnoli et al., J. Immunol. (1991) 133:327-340, Bertagnoli et al., J. Immunol. (1992) 149:3778-3783, and Bowman et al., J. Immunol. (1994) 152:1756-1761. B cell proliferation and Ig secretion are assayed as described in Maliszewski, J. Immunol. (1990) 144:3028-3033, and Assays for B Cell Function: In vitro antibody production, Mond and Brunswick, Current Protocols in Immunol., Coligan Ed vol 1 pp 3.8.1-3.8.16, John Wiley and Sons, Toronto 1994, Kehrl et al., Science (1987) 238:1144 and Boussiotis et al., PNAS USA (1994) 91:7007.

[0234] Other in vivo activities include upregulation of cell surface antigens, upregulation of costimulatory molecules, and cellular aggregation/adhesion as described in Barrett et al., J. Immunol. (1991) 146:1722; Bjorck et al., Eur. J. Immunol. (1993) 23:1771; Clark et al, Annu Rev. Immunol. (1991) 9:97; Ranheim et al., J. Exp. Med. (1994) 177:925; Yellin, J. Immunol. (1994) 153:666; and Gruss et al., Blood (1994) 84:2305.

[0235] Proliferation and differentiation of hematopoietic and lymphopoietic cells has also been shown in vivo for TNFs, using assays for embryonic differentiation and hematopoiesis as described in Johansson et al., Cellular Biology (1995) 15:141-151, Keller et al., Mol. Cell. Biol. (1993) 13:473486, McClanahan et al., Blood (1993) 81:2903-2915 and using assays to detect stem cell survival and differentiation as described in Culture of Hematopoietic Cells, Freshney et al. eds, pp 1-21, 23-29, 139-162, 163-179, and 265-268, Wiley-Liss, Inc., New York, N.Y., 1994, and Hirajama et al., PNAS USA (1992) 89:5907-5911.

[0236] In vivo activities of TNFs also include lymphocyte survival and apoptosis, assayed as described in Darzynkewicz et al., Cytometry (1992) 13:795-808; Gorczca et al., Leukemia (1993) 7:659-670; Itoh et al., Cell (1991) 66:233-243; Zacharduk, J. Immunol. (1990) 145:40374045; Zamai et al., Cytometry (1993) 14:891-897; and Gorczyca et al., Int'l J. Oncol. (1992) 1:639-648.

[0237] Some members of the TNF family are cleaved from the cell surface; others remain membrane bound. The three-dimensional structure of TNF is discussed in Sprang and Eck, Tumor Necrosis Factors; supra.

[0238] TNF proteins include a transmembrane domain. The protein is cleaved into a shorter soluble version, as described in Kriegler et al., Cell (1988) 53:45-53, Perez et al., Cell (1990) 63:251-258, and Shaw et al., Cell (1986) 46:659-667. The transmembrane domain is between amino acid 46 and 77 and the cytoplasmic domain is between position 1 and 45 on the human form of TNFα. The 3-dimensional motifs of TNF include a sandwich of two pleated β sheets. Each sheet is composed of anti-parallel α strands. α Strands facing each other on opposite sites of the sandwich are connected by short polypeptide loops, as described in Van Ostade et al., Protein Engineering (1994) 7(1):5-22, and Sprang et al., Tumor Necrosis Factors; supra.

[0239] Residues of the TNF family proteins that are involved in the β sheet secondary structure have been identified as described in Van Ostade et al., Protein Engineering (1994) 7(1):5-22, and Sprang et al., Tumor Necrosis Factors; supra.

[0240] TNF receptors are disclosed in U.S. Pat. No. 5,395,760. A profile derived from the TNF receptor family is created by aligning sequences of the TNF receptor family, including Apo1/Fas, TNFR I and II, death receptor3 (DR3), CD40, ox40, CD27, and CD30. Thus, the profile is designed to identify, from the nucleic acids of the invention, sequences of proteins that constitute new members or homologs of this family of proteins.

[0241] Tumor necrosis factor receptors exist in two forms in humans: p55 TNFR and p75 TNFR, both of which provide intracellular signals upon binding with a ligand. The extracellular domains of these receptor proteins are cysteine rich. The receptors can remain membrane bound, although some forms of the receptors are cleaved forming soluble receptors. The regulation, diagnostic, prognostic, and therapeutic value of soluble TNF receptors is discussed in Aderka, Cytokine and Growth Factor Reviews, (1996) 7(3):231-240.

### PDGF Family

[0242] U.S. Pat. No. 5,326,695 discloses platelet derived growth factor agonists; bioactive portions of PDGF-B are used as agonists. U.S. Pat. No. 4,845,075 discloses biologically active B-chain homodimers, and also includes variants and derivatives of the PDGF-B chain. U.S. Pat. No. 5,128,321 discloses PDGF analogs and methods of use. Proteins having the same bioactivity as PDGF are disclosed, including A and B chain proteins.

### Kinase (Including MKK) Family

[0243] U.S. Pat. No. 5,650,501 discloses serine/threonine kinase, associated with mitotic and meiotic cell division; the protein has a kinase domain in its N-terminal and 3 PEST regions in the C-terminus. U.S. Pat. No. 5,605,825 discloses human PAK65, a serine protein kinase.

[0244] The foregoing discussion provides a few examples of the protein profiles that can be compared with the nucleic acids of the invention. One skilled in the art can use these and other protein profiles to identify the genes that correlate with the nucleic acids.

[0245] IX. Determining the Function of the Encoded Expression Products

[0246] Ribozymes, antisense constructs, dominant negative mutants, and triplex formation can be used to determine function of the expression product of an nucleic acid-related gene.

[0247] A. Ribozymes

[0248] Trans-cleaving catalytic RNAs (ribozymes) are RNA molecules possessing endoribonuclease activity. Ribozymes are specifically designed for a particular target, and the target message must contain a specific nucleotide sequence. They are engineered to cleave any RNA species site-specifically in the background of cellular RNA. The cleavage event renders the mRNA unstable and prevents protein expression. Importantly, ribozymes can be used to inhibit expression of a gene of unknown function for the purpose of determining its function in an in vitro or in vivo context, by detecting the phenotypic effect.

[0249] One commonly used ribozyme motif is the hammerhead, for which the substrate sequence requirements are minimal. Design of the hammerhead ribozyme is disclosed in Usman et al., Current Opin. Struct. Biol. (1996) 6:527-533. Usman also discusses the therapeutic uses of ribozymes. Ribozymes can also be prepared and used as described in Long et al., FASEB J. (1993) 7:25; Symons, Ann. Rev. Biochem. (1992) 61:641; Perrotta et al., Biochem. (1992) 31:16-17; Ojwang et al; Proc. Natl. Acad Sci. (USA) (1992) 89:10802-10806; and U.S. Pat. No. 5,254,678. Ribozyme cleavage of HIV-1 RNA is described in U.S. Pat. No. 5,144,019; methods of cleaving RNA using ribozymes is described in U.S. Pat. No. 5,116,742; and methods for increasing the specificity of ribozymes are described in U.S. Pat. No.5,225,337 and Koizumi et al., Nucleic Acid Res. (1989) 17:7059-7071. Preparation and use of ribozyme fragments in a hammerhead structure are also described by Koizumi et al., Nucleic Acids Res. (1989) 17:7059-7071. Preparation and use of ribozyme fragments in a hairpin structure are described by Chowrira and Burke, Nucleic Acids Res. (1992) 20:2835. Ribozymes can also be made by rolling transcription as described in Daubendiek and Kool, Nat. Biotechnol. (1997) 15(3):273-277.

[0250] The hybridizing region of the ribozyme may be modified or may be prepared as a branched structure as described in Horn and Urdea, Nucleic Acids Res. (1989) 17:6959-67. The basic structure of the ribozymes may also be chemically altered in ways familiar to those skilled in the art, and chemically synthesized ribozymes can be administered as synthetic oligonucleotide derivatives modified by monomeric units. In a therapeutic context, liposome mediated delivery of ribozymes improves cellular uptake, as described in Birikh et al., Eur. J. Biochem. (1997) 245:1-16.

[0251] Using the nucleic acid sequences of the invention and methods known in the art, ribozymes are designed to specifically bind and cut the corresponding mRNA species. Ribozymes thus provide a means to inhibit the expression of any of the proteins encoded by the disclosed nucleic acids or their full-length genes. The full-length gene need not be known in order to design and use specific inhibitory ribozymes. In the case of an nucleic acid or cDNA of unknown function, ribozymes corresponding to that nucleotide sequence can be tested in vitro for efficacy in cleaving the target transcript. Those ribozymes that effect cleavage in vitro are further tested in vivo. The ribozyme can also be used to generate an animal model for a disease, as described in Birikh et al., Eur. J. Biochem. (1997) 245:1-16. An effective ribozyme is used to determine the function of the gene of interest by blocking its transcription and detecting a change in the cell. Where the gene is found to be a mediator in a disease, an effective ribozyme is designed and delivered in a gene therapy for blocking transcription and expression of the gene.

[0252] Therapeutic and functional genomic applications of ribozymes proceed beginning with knowledge of a portion of the coding sequence of the gene to be inhibited. Thus, for many genes, a partial nucleic acid sequence provides adequate sequence for constructing an effective ribozyme. A target cleavage site is selected in the target sequence, and a ribozyme is constructed based on the S′ and 3′ nucleotide sequences that flank the cleavage site. Retroviral vectors are engineered to express monomeric and multimeric hammerhead ribozymes targeting the mRNA of the target coding sequence. These monomeric and multimeric ribozymes are tested in vitro for an ability to cleave the target mRNA. A cell line is stably transduced with the retroviral vectors expressing the ribozymes, and the transduction is confirmed by Northern blot analysis and reverse-transcription polymerase chain reaction (RT-PCR). The cells are screened for inactivation of the target mRNA by such indicators as reduction of expression of disease markers or reduction of the gene product of the target mRNA.

[0253] B. Antisense

[0254] Antisense nucleic acids are designed to specifically bind to RNA, resulting in the formation of RNA-DNA or RNA-RNA hybrids, with an arrest of DNA replication, reverse transcription or messenger RNA translation. Antisense polynucleotides based on a selected nucleic acid sequence can interfere with expression of the corresponding gene. Antisense polynucleotides are typically generated within the cell by expression from antisense constructs that contain the antisense nucleic acid strand as the transcribed strand. Antisense nucleic acids will bind and/or interfere with the translation of nucleic acid-related mRNA. The expression products of control cells and cells treated with the antisense construct are compared to detect the protein product of the gene corresponding to the nucleic acid. The protein is isolated and identified using routine biochemical methods.

[0255] One rationale for using antisense methods to determine the function of the gene corresponding to an nucleic acid is the biological activity of antisense therapeutics. Antisense therapy for a variety of cancers is in clinical phase and has been discussed extensively in the literature. Reed reviewed antisense therapy directed at the Bcl-2 gene in tumors; gene transfer-mediated overexpression of Bc1-2 in tumor cell lines conferred resistance to many types of cancer drugs. (Reed, J. C., N.C.I. (1997) 89:988-990). The potential for clinical development of antisense inhibitors of ras is discussed by Cowsert, L. M., Anti-Cancer Drug Design (1997) 12:359-371. Additional important antisense targets include leukemia (Geurtz, A. M., Anti-Cancer Drug Design (1997) 12:341-358); human C-ref kinase (Monia, B. P., Anti-Cancer Drug Design (1997) 12:327-339); and protein kinase C (McGraw et al., Anti-Cancer Drug Design (1997) 12:315-326.

[0256] Given the extensive background literature and clinical experience in antisense therapy, one skilled in the art can use selected nucleic acids of the invention as additional potential therapeutics. The choice of nucleic acid can be narrowed by first testing them for binding to “hot spot” regions of the genome of cancerous cells. If an nucleic acid is identified as binding to a “hot spot”, testing the nucleic acid as an antisense compound in the corresponding cancer cells clearly is warranted.

[0257] Ogunbiyi et al., Gastroenterology (1997) 113(3):761-766 describe prognostic use of allelic loss in colon cancer, Barks et al., Genes, Chromosomes, and Cancer (1997) 19(4):278-285 describe increased chromosome copy number detected by FISH in malignant melanoma; Nishizake et al., Genes, Chromosomes, and Cancer (1997) 19(4):267-272 describe genetic alterations in primary breast cancer and their metastases and direct comparison using modified comparative genome hybridization; and Elo et al., Cancer Research (1997) 57(16):3356-3359 disclose that loss of heterozygosity at 16z24.1-q24.2 is significantly associated with metastatic and aggressive behavior of prostate cancer.

[0258] C. Dominant Negative Mutations

[0259] As an alternative method for identifying function of the nucleic acid-related gene, dominant negative mutations are readily generated for corresponding proteins that are active as homomultimers. A mutant polypeptide will interact with wild-type polypeptides (made from the other allele) and form a non-functional multimer. Thus, a mutation is in a substrate-binding domain, a catalytic domain, or a cellular localization domain. Preferably, the mutant polypeptide will be overproduced. Point mutations are made that have such an effect. In addition, fusion of different polypeptides of various lengths to the terminus of a protein can yield dominant negative mutants. General strategies are available for making dominant negative mutants. See Herskowitz, Nature (1987) 329:219-222. Such a technique can be used for creating a loss-of-function mutation, which is useful for determining the function of a protein.

[0260] D. Triplex Formation

[0261] Endogenous gene expression can also be reduced by inactivating or “knocking out” the gene or its promoter using targeted homologous recombination. (E.g., see Smithies et al., 1985, Nature 317:230-234; Thomas & Capecchi, 1987, Cell 51:503-512; Thompson et al., 1989 Cell 5:313-321; each of which is incorporated by reference herein in its entirety). For example, a mutant, non-functional gene (or a completely unrelated DNA sequence) flanked by DNA homologous to the endogenous gene (either the coding regions or regulatory regions of the gene) can be used, with or without a selectable marker and/or a negative selectable marker, to transfect cells that express that gene in vivo. Insertion of the DNA construct, via targeted homologous recombination, results in inactivation of the gene.

[0262] Alternatively, endogenous gene expression can be reduced by targeting deoxyribonucleotide sequences complementary to the regulatory region of the target gene (i.e., the gene promoter and/or enhancers) to form triple helical structures that prevent transcription of the gene in target cells in the body. (See generally, Helene, C. 1991, Anticancer Drug Des., 6(6):569-84; Helene, C., et al., 1992, Ann, N.Y. Accad. Sci., 660:27-36; and Maher, L. J., 1992, Bioassays 14(12):807-15).

[0263] Nucleic acid molecules to be used in triple helix formation for the inhibition of transcription are preferably single stranded and composed of deoxyribonucleotides. The base composition of these oligonucleotides should promote triple helix formation via Hoogsteen base-pairing rules, which generally require sizable stretches of either purines or pyrimidines to be present on one strand of a duplex. Nucleotide sequences may be pyrimidine-based, which will result in TAT and CGC triplets across the three associated strands of the resulting triple helix. The pyrimidine-rich molecules provide base complementarity to a purine-rich region of a single strand of the duplex in a parallel orientation to that strand. In addition, nucleic acid molecules may be chosen that are purine-rich, for example, containing a stretch of G residues. These molecules will form a triple helix with a DNA duplex that is rich in GC pairs, in which the majority of the purine residues are located on a single strand of the targeted duplex, resulting in CGC triplets across the three strands in the triplex.

[0264] Alternatively, the potential sequences that can be targeted for triple helix formation may be increased by creating a so called “switchback” nucleic acid molecule. Switchback molecules are synthesized in an alternating 5′-3′, 3′-5′ manner, such that they base pair with first one strand of a duplex and then the other, eliminating the necessity for a sizable stretch of either purines or pyrimidines to be present on one strand of a duplex.

[0265] Antisense RNA and DNA, ribozyme, and triple helix molecules of the invention may be prepared by any method known in the art for the synthesis of DNA and RNA molecules. These include techniques for chemically synthesizing oligodeoxyribonucleotides and oligoribonucleotides well known in the art such as for example solid phase phosphoramidite chemical synthesis. Alternatively, RNA molecules may be generated by in vitro and in vivo transcription of DNA sequences encoding the antisense RNA molecule. Such DNA sequences may be incorporated into a wide variety of vectors which incorporate suitable RNA polymerase promoters such as the T7 or SP6 polymerase promoters. Alternatively, antisense cDNA constructs that synthesize antisense RNA constitutively or inducibly, depending on the promoter used, can be introduced stably into cell lines.

[0266] Moreover, various well known modifications to nucleic acid molecules may be introduced as a means of increasing intracellular stability and half-life. Possible modifications include but are not limited to the addition of flanking sequences of ribonucleotides or deoxyribonucleotides to the 5′ and/or 3′ ends of the molecule or the use of phosphorothioate or 2′ O-methyl rather than phosphodiesterase linkages within the oligodeoxyribonucleotide backbone.

[0267] X. Diagnostic & Prognostic Assays and Drug Screening Methods

[0268] The present invention provides method for determining whether a subject is at risk for developing a disease or condition characterized by unwanted cell proliferation by detecting the disclosed biomarkers, i.e., the disclosed nucleic acid markers (SEQ ID Nos:1-850) and/or polypeptide markers for colon cancer encoded thereby.

[0269] In clinical applications, human tissue samples can be screened for the presence and/or absence of the biomarkers identified herein. Such samples could consist of needle biopsy cores, surgical resection samples, lymph node tissue, or serum. For example, these methods include obtaining a biopsy, which is optionally fractionated by cryostat sectioning to enrich tumor cells to about 80% of the total cell population. In certain embodiments, nucleic acids extracted from these samples may be amplified using techniques well known in the art. The levels of selected markers detected would be compared with statistically valid groups of metastatic, non-metastatic malignant, benign, or normal colon tissue samples.

[0270] In one embodiment, the diagnostic method comprises determining whether a subject has an abnormal mRNA and/or protein level of the disclosed markers, such as by Northern blot analysis, reverse transcription-polymerase chain reaction (RT-PCR), in situ hybridization, immunoprecipitation, Western blot hybridization, or immunohistochemistry. According to the method, cells are obtained from a subject and the levels of the disclosed biomarkers, protein or mRNA level, is determined and compared to the level of these markers in a healthy subject. An abnormal level of the biomarker polypeptide or mRNA levels is likely to be indicative of cancer such as colon cancer.

[0271] Accordingly, in one aspect, the invention provides probes and primers that are specific to the unique nucleic acid markers disclosed herein. Accordingly, the nucleic acid probes comprise a nucleotide sequence at least 12 nucleotides in length, preferably at least 15 nucleotides, more preferably, 25 nucleotides, and most preferably at least 40 nucleotides, and up to all or nearly all of the coding sequence which is complementary to a portion of the coding sequence of a marker nucleic acid sequence, which nucleic acid sequence is represented by SEQ ID Nos:1-850 or a sequence complementary thereto.

[0272] In one embodiment, the method comprises using a nucleic acid probe to determine the presence of cancerous cells in a tissue from a patient. Specifically, the method comprises:

[0273] 1. providing a nucleic acid probe comprising a nucleotide sequence at least 12 nucleotides in length, preferably at least 15 nucleotides, more preferably, 25 nucleotides, and most preferably at least 40 nucleotides, and up to all or nearly all of the coding sequence which is complementary to a portion of the coding sequence of a nucleic acid sequence represented by SEQ ID Nos:1-850 or a sequence complementary thereto and is differentially expressed in tumors cells, such as colon cancer cells;

[0274] 2. obtaining a tissue sample from a patient potentially comprising cancerous cells;

[0275] 3. providing a second tissue sample containing cells substantially all of which are non-cancerous;

[0276] 4. contacting the nucleic acid probe under stringent conditions with RNA of each of said first and second tissue samples (e.g., in a Northern blot or in situ hybridization assay); and

[0277] 5. comparing (a) the amount of hybridization of the probe with RNA of the first tissue sample, with (b) the amount of hybridization of the probe with RNA of the second tissue sample;

[0278] wherein a statistically significant difference in the amount of hybridization with the RNA of the first tissue sample as compared to the amount of hybridization with the RNA of the second tissue sample is indicative of the presence of cancerous cells in the first tissue sample.

[0279] In one aspect, the method comprises in situ hybridization with a probe derived from a given marker nucleic acid sequence, which nucleic acid sequence is represented by SEQ ID Nos:1-850 or a sequence complementary thereto. The method comprises contacting the labeled hybridization probe with a sample of a given type of tissue potentially containing cancerous or precancerous cells as well as normal cells, and determining whether the probe labels some cells of the given tissue type to a degree significantly different (e.g., by at least a factor of two, or at least a factor of five, or at least a factor of twenty, or at least a factor of fifty) than the degree to which it labels other cells of the same tissue type.

[0280] Also within the invention is a method of determining the phenotype of a test cell from a given human tissue, e.g., whether the cell is (a) normal, or (b) cancerous or precancerous, by contacting the mRNA of a test cell with a nucleic acid probe at least 12 nucleotides in length, preferably at least 15 nucleotides, more preferably at least 25 nucleotides, and most preferably at least 40 nucleotides, and up to all or nearly all of a sequence which is complementary to a portion of the coding sequence of a nucleic acid sequence represented by SEQ ID Nos:1-850 or a sequence complementary thereto, and which is differentially expressed in tumor cells as compared to normal cells of the given tissue type; and determining the approximate amount of hybridization of the probe to the mRNA, an amount of hybridization either more or less than that seen with the mRNA of a normal cell of that tissue type being indicative that the test cell is cancerous or precancerous.

[0281] Alternatively, the above diagnostic assays may be carried out using antibodies to detect the protein product encoded by the marker nucleic acid sequence, which nucleic acid sequence is represented by SEQ ID Nos:1-850 or a sequence complementary thereto. Accordingly, in one embodiment, the assay would include contacting the proteins of the test cell with an antibody specific for the gene product of a nucleic acid represented by SEQ ID Nos:1-850 or a sequence complementary thereto, the marker nucleic acid being one which is expressed at a given control level in normal cells of the same tissue type as the test cell, and determining the approximate amount of immunocomplex formation by the antibody and the proteins of the test cell, wherein a statistically significant difference in the amount of the immunocomplex formed with the proteins of a test cell as compared to a normal cell of the same tissue type is an indication that the test cell is cancerous or precancerous.

[0282] Another such method includes the steps of: providing an antibody specific for the gene product of a marker nucleic acid sequence represented by SEQ ID Nos 1-850, the gene product being present in cancerous tissue of a given tissue type (e.g., colon tissue) at a level more or less than the level of the gene product in noncancerous tissue of the same tissue type; obtaining from a patient a first sample of tissue of the given tissue type, which sample potentially includes cancerous cells; providing a second sample of tissue of the same tissue type (which may be from the same patient or from a normal control, e.g. another individual or cultured cells), this second sample containing normal cells and essentially no cancerous cells; contacting the antibody with protein (which may be partially purified, in lysed but unfractionated cells, or in situ) of the first and second samples under conditions permitting immunocomplex formation between the antibody and the marker nucleic acid sequence product present in the samples; and comparing (a) the amount of immunocomplex formation in the first sample, with (b) the amount of immunocomplex formation in the second sample, wherein a statistically significant difference in the amount of immunocomplex formation in the first sample less as compared to the amount of immunocomplex formation in the second sample is indicative of the presence of cancerous cells in the first sample of tissue.

[0283] The subject invention further provides a method of determining whether a cell sample obtained from a subject possesses an abnormal amount of marker polypeptide which comprises (a) obtaining a cell sample from the subject, (b) quantitatively determining the amount of the marker polypeptide in the sample so obtained, and (c) comparing the amount of the marker polypeptide so determined with a known standard, so as to thereby determine whether the cell sample obtained from the subject possesses an abnormal amount of the marker polypeptide. Such marker polypeptides may be detected by immunohistochemical assays, dot-blot assays, ELISA and the like.

[0284] Immunoassays are commonly used to quantitate the levels of proteins in cell samples, and many other immunoassay techniques are known in the art. The invention is not limited to a particular assay procedure, and therefore is intended to include both homogeneous and heterogeneous procedures. Exemplary immunoassays which can be conducted according to the invention include fluorescence polarization immunoassay (FPIA), fluorescence immunoassay (FIA), enzyme immunoassay (EIA), nephelometric inhibition immunoassay (NIA), enzyme linked immunosorbent assay (ELISA), and radioimmunoassay (RIA). An indicator moiety, or label group, can be attached to the subject antibodies and is selected so as to meet the needs of various uses of the method which are often dictated by the availability of assay equipment and compatible immunoassay procedures. General techniques to be used in performing the various immunoassays noted above are known to those of ordinary skill in the art.

[0285] In another embodiment, the level of the encoded product, i.e., the product encoded by SEQ ID Nos 1-850 or a sequence complementary thereto, in a biological fluid (e.g., blood or urine) of a patient may be determined as a way of monitoring the level of expression of the marker nucleic acid sequence in cells of that patient Such a method would include the steps of obtaining a sample of a biological fluid from the patient, contacting the sample (or proteins from the sample) with an antibody specific for a encoded marker polypeptide, and determining the amount of immune complex formation by the antibody, with the amount of immune complex formation being indicative of the level of the marker encoded product in the sample. This determination is particularly instructive when compared to the amount of immune complex formation by the same antibody in a control sample taken from a normal individual or in one or more samples previously or subsequently obtained from the same person.

[0286] In another embodiment, the method can be used to determine the amount of marker polypeptide present in a cell, which in turn can be correlated with progression of a hyperproliferative disorder, e.g., colon cancer. The level of the marker polypeptide can be used predictively to evaluate whether a sample of cells contains cells which are, or are predisposed towards becoming, transformed cells. Moreover, the subject method can be used to assess the phenotype of cells which are known to be transformed, the phenotyping results being useful in planning a particular therapeutic regimen. For instance, very high levels of the marker polypeptide in sample cells is a powerful diagnostic and prognostic marker for a cancer, such as colon cancer. The observation of marker polypeptide level can be utilized in decisions regarding, e.g., the use of more aggressive therapies.

[0287] As set out above, one aspect of the present invention relates to diagnostic assays for determining, in the context of cells isolated from a patient, if the level of a marker polypeptide is significantly reduced in the sample cells. The term “significantly reduced” refers to a cell phenotype wherein the cell possesses a reduced cellular amount of the marker polypeptide relative to a normal cell of similar tissue origin. For example, a cell may have less than about 50%, 25%, 10%, or 5% of the marker polypeptide that a normal control cell. In particular, the assay evaluates the level of marker polypeptide in the test cells, and, preferably, compares the measured level with marker polypeptide detected in at least one control cell, e.g., a normal cell and/or a transformed cell of known phenotype.

[0288] Of particular importance to the subject invention is the ability to quantitate the level of marker polypeptide as determined by the number of cells associated with a normal or abnormal marker polypeptide level. The number of cells with a particular marker polypeptide phenotype may then be correlated with patient prognosis. In one embodiment of the invention, the marker polypeptide phenotype of the lesion is determined as a percentage of cells in a biopsy which are found to have abnormally high/low levels of the marker polypeptide. Such expression may be detected by immunohistochemical assays, dot-blot assays, ELISA and the like.

[0289] Where tissue samples are employed, immunohistochemical staining may be used to determine the number of cells having the marker polypeptide phenotype. For such staining, a multiblock of tissue is taken from the biopsy or other tissue sample and subjected to proteolytic hydrolysis, employing such agents as protease K or pepsin. In certain embodiments, it may be desirable to isolate a nuclear fraction from the sample cells and detect the level of the marker polypeptide in the nuclear fraction.

[0290] The tissue samples are fixed by treatment with a reagent such as formalin, glutaraldehyde, methanol, or the like. The samples are then incubated with an antibody, preferably a monoclonal antibody, with binding specificity for the marker polypeptides. This antibody may be conjugated to a label for subsequent detection of binding. Samples are incubated for a time sufficient for formation of the immuno-complexes. Binding of the antibody is then detected by virtue of a label conjugated to this antibody. Where the antibody is unlabeled, a second labeled antibody may be employed, e.g., which is specific for the isotype of the anti-marker polypeptide antibody. Examples of labels which may be employed include radionuclides, fluorescers, chemiluminescers, enzymes and the like.

[0291] Where enzymes are employed, the substrate for the enzyme may be added to the samples to provide a colored or fluorescent product. Examples of suitable enzymes for use in conjugates include horseradish peroxidase, alkaline phosphatase, malate dehydrogenase and the like. Where not commercially available, such antibody-enzyme conjugates are readily produced by techniques known to those skilled in the art.

[0292] In one embodiment, the assay is performed as a dot blot assay. The dot blot assay finds particular application where tissue samples are employed as it allows determination of the average amount of the marker polypeptide associated with a single cell by correlating the amount of marker polypeptide in a cell-free extract produced from a predetermined number of cells.

[0293] It is well established in the cancer literature that tumor cells of the same type (e.g., breast and/or colon tumor cells) may not show uniformly increased expression of individual oncogenes or uniformly decreased expression of individual tumor suppressor genes. There may also be varying levels of expression of a given marker gene even between cells of a given type of cancer, further emphasizing the need for reliance on a battery of tests rather than a single test. Accordingly, in one aspect, the invention provides for a battery of tests utilizing a number of probes of the invention, in order to improve the reliability and/or accuracy of the diagnostic test.

[0294] In one embodiment, the present invention also provides a method wherein nucleic acid probes are immobilized on a DNA chip in an organized array. Oligonucleotides can be bound to a solid support by a variety of processes, including lithography. For example a chip can hold up to 250,000 oligonucleotides (GeneChip, Affymetrix). These nucleic acid probes comprise a nucleotide sequence at least about 12 nucleotides in length, preferably at least about 15 nucleotides, more preferably at least about 25 nucleotides, and most preferably at least about 40 nucleotides, and up to all or nearly all of a sequence which is complementary to a portion of the coding sequence of a marker nucleic acid sequence represented by SEQ ID Nos:1-850 and is differentially expressed in tumor cells, such as colon cancer cells. The present invention provides significant advantages over the available tests for various cancers, such as colon cancer, because it increases the reliability of the test by providing an array of nucleic acid markers on a single chip.

[0295] The method includes obtaining a biopsy, which is optionally fractionated by cryostat sectioning to enrich tumor cells to about 80% of the total cell population. The DNA or RNA is then extracted, amplified, and analyzed with a DNA chip to determine the presence of absence of the marker nucleic acid sequences.

[0296] In one embodiment, the nucleic acid probes are spotted onto a substrate in a two-dimensional matrix or array. Samples of nucleic acids can be labeled and then hybridized to the probes. Double-stranded nucleic acids, comprising the labeled sample nucleic acids bound to probe nucleic acids, can be detected once the unbound portion of the sample is washed away.

[0297] The probe nucleic acids can be spotted on substrates including glass, nitrocellulose, etc. The probes can be bound to the substrate by either covalent bonds or by non-specific interactions, such as hydrophobic interactions. The sample nucleic acids can be labeled using radioactive labels, fluorophores, chromophores, etc.

[0298] Techniques for constructing arrays and methods of using these arrays are described in EP No. 0 799 897; PCT No. WO 97/29212; PCT No. WO 97/27317; EP No. 0 785 280; PCT No. WO 97/02357; U.S. Pat. No. 5,593,839; U.S. Pat. No. 5,578,832; EP No. 0 728 520; U.S. Pat. No. 5,599,695; EP No. 0 721 016; U.S. Pat. No. 5,556,752; PCT No. WO 95122058; and U.S. Pat. No. 5,631,734.

[0299] Further, arrays can be used to examine differential expression of genes and can be used to determine gene function. For example, arrays of the instant nucleic acid sequences can be used to determine if any of the nucleic acid sequences are differentially expressed between normal cells and cancer cells, for example. High expression of a particular message in a cancer cell, which is not observed in a corresponding normal cell, can indicate a cancer specific protein.

[0300] In yet another embodiment, the invention contemplates using a panel of antibodies which are generated against the marker polypeptides of this invention, which polypeptides are encoded by SEQ ID Nos 1-850. Such a panel of antibodies may be used as a reliable diagnostic probe for colon cancer. The assay of the present invention comprises contacting a biopsy sample containing cells, e.g., colon cells, with a panel of antibodies to one or more of the encoded products to determine the presence or absence of the marker polypeptides.

[0301] The diagnostic methods of the subject invention may also be employed as follow-up to treatment, e.g., quantitation of the level of marker polypeptides may be indicative of the effectiveness of current or previously employed cancer therapies as well as the effect of these therapies upon patient prognosis.

[0302] Accordingly, the present invention makes available diagnostic assays and reagents for detecting gain and/or loss of marker polypeptides from a cell in order to aid in the diagnosis and phenotyping of proliferative disorders arising from, for example, tumorigenic transformation of cells.

[0303] The diagnostic assays described above can be adapted to be used as prognostic assays, as well. Such an application takes advantage of the sensitivity of the assays of the invention to events which take place at characteristic stages in the progression of a tumor. For example, a given marker gene may be up or downregulated at a very early stage, perhaps before the cell is irreversibly committed to developing into a malignancy, while another marker gene may be characteristically up or down regulated only at a much later stage. Such a method could involve the steps of contacting the mRNA of a test cell with a nucleic acid probe derived from a given marker nucleic acid which is expressed at different characteristic levels in cancerous or precancerous cells at different stages of tumor progression, and determining the approximate amount of hybridization of the probe to the mRNA of the cell, such amount being an indication of the level of expression of the gene in the cell, and thus an indication of the stage of tumor progression of the cell; alternatively, the assay can be carried out with an antibody specific for the gene product of the given marker nucleic acid, contacted with the proteins of the test cell. A battery of such tests will disclose not only the existence and location of a tumor, but also will allow the clinician to select the mode of treatment most appropriate for the tumor, and to predict the likelihood of success of that treatment.

[0304] The methods of the invention can also be used to follow the clinical course of a tumor. For example, the assay of the invention can be applied to a tissue sample from a patient; following treatment of the patient for the cancer, another tissue sample is taken and the test repeated. Successful treatment will result in either removal of all cells which demonstrate differential expression characteristic of the cancerous or precancerous cells, or a substantial increase in expression of the gene in those cells, perhaps approaching or even surpassing normal levels.

[0305] In yet another embodiment, the invention provides methods for determining whether a subject is at risk for developing a disease, such as a predisposition to develop cancer, for example colon cancer, associated with an aberrant activity of any one of the polypeptides encoded by nucleic acids of SEQ ID Nos:1-850, wherein the aberrant activity of the polypeptide is characterized by detecting the presence or absence of a genetic lesion characterized by at least one of (i) an alteration affecting the integrity of a gene encoding a marker polypeptides, or (ii) the mis-expression of the encoding nucleic acid. To illustrate, such genetic lesions can be detected by ascertaining the existence of at least one of (i) a deletion of one or more nucleotides from the nucleic acid sequence, (ii) an addition of one or more nucleotides to the nucleic acid sequence, (iii) a substitution of one or more nucleotides of the nucleic acid sequence, (iv) a gross chromosomal rearrangement of the nucleic acid sequence, (v) a gross alteration in the level of a messenger RNA transcript of the nucleic acid sequence, (vii) aberrant modification of the nucleic acid sequence, such as of the methylation pattern of the genomic DNA, (vii) the presence of a non-wild type splicing pattern of a messenger RNA transcript of the gene, (viii) a non-wild type level of the marker polypeptide, (ix) allelic loss of the gene, and/or (x) inappropriate post-translational modification of the marker polypeptide.

[0306] The present invention provides assay techniques for detecting lesions in the encoding nucleic acid sequence. These methods include, but are not limited to, methods involving sequence analysis, Southern blot hybridization, restriction enzyme site mapping, and methods involving detection of absence of nucleotide pairing between the nucleic acid to be analyzed and a probe.

[0307] Specific diseases or disorders, e.g., genetic diseases or disorders, are associated with specific allelic variants of polymorphic regions of certain genes, which do not necessarily encode a mutated protein. Thus, the presence of a specific allelic variant of a polymorphic region of a gene in a subject can render the subject susceptible to developing a specific disease or disorder. Polymorphic regions in genes, can be identified, by determining the nucleotide sequence of genes in populations of individuals. If a polymorphic region is identified, then the link with a specific disease can be determined by studying specific populations of individuals, e.g., individuals which developed a specific disease, such as colon cancer. A polymorphic region can be located in any region of a gene, e.g., exons, in coding or non coding regions of exons, introns, and promoter region.

[0308] In an exemplary embodiment, there is provided a nucleic acid composition comprising a nucleic acid probe including a region of nucleotide sequence which is capable of hybridizing to a sense or antisense sequence of a gene or naturally occurring mutants thereof, or 5′ or 3′ flanking sequences or intronic sequences naturally associated with the subject genes or naturally occurring mutants thereof. The nucleic acid of a cell is rendered accessible for hybridization, the probe is contacted with the nucleic acid of the sample, and the hybridization of the probe to the sample nucleic acid is detected. Such techniques can be used to detect lesions or allelic variants at either the genomic or mRNA level, including deletions, substitutions, etc., as well as to determine mRNA transcript levels.

[0309] A preferred detection method is allele specific hybridization using probes overlapping the mutation or polymorphic site and having about 5, 10, 20, 25, or 30 nucleotides around the mutation or polymorphic region. In a preferred embodiment of the invention, several probes capable of hybridizing specifically to allelic variants are attached to a solid phase support, e.g., a “chip”. Mutation detection analysis using these chips comprising oligonucleotides, also termed “DNA probe arrays” is described e.g., in Cronin et al. (1996) Human Mutation 7:244. In one embodiment, a chip comprises all the allelic variants of at least one polymorphic region of a gene. The solid phase. support is then contacted with a test nucleic acid and hybridization to the specific probes is detected. Accordingly, the identity of numerous allelic variants of one or more genes can be identified in a simple hybridization experiment.

[0310] In certain embodiments, detection of the lesion comprises utilizing the probe/primer in a polymerase chain reaction (PCR) (see, e.g. U.S.; Pat. Nos. 4,683,195 and 4,683,202), such as anchor PCR or RACE PCR, or, alternatively, in a ligase chain reaction (LCR) (see, e.g., Landegran et al. (1988) Science 241:1077-1080; and Nakazawa et al. (1994) PNAS 91:360-364), the latter of which can be particularly useful for detecting point mutations in the gene (see Abravaya et al. (1995) Nuc Acid Res 23:675-682). In a merely illustrative embodiment, the method includes the steps of (i) collecting a sample of cells from a patient, (ii) isolating nucleic acid (e.g., genomic, mRNA or both) from the cells of the sample, (iii)

[0311] Drug screening is performed by adding a test compound to a sample of cells, and monitoring the effect. A parallel sample which does not receive the test compound is also monitored as a control. The treated and untreated cells are then compared by any suitable phenotypic criteria, including but not limited to microscopic analysis, viability testing, ability to replicate, histological examination, the level of a particular RNA or polypeptide associated with the cells, the level of enzymatic activity expressed by the cells or cell lysates, and the ability of the cells to interact with other cells or compounds. Differences between treated and untreated cells indicates effects attributable to the test compound.

[0312] Desirable effects of a test compound include an effect on any phenotype that was conferred by the cancer-associated marker nucleic acid sequence. Examples include a test compound that limits the overabundance of mRNA, limits production of the encoded protein, or limits the functional effect of the protein. The effect of the test compound would be apparent when comparing results between treated and untreated cells.

[0313] The invention thus also encompasses methods of screening for agents which inhibit expression of the nucleic acid markers (SEQ ID Nos:1-850) in vitro, comprising exposing a cell or tissue in which the marker nucleic acid mRNA is detectable in cultured cells to an agent in order to determine whether the agent is capable of inhibiting production of the mRNA; and determining the level of mRNA in the exposed cells or tissue, wherein a decrease in the level of the mRNA after exposure of the cell line to the agent is indicative of inhibition of the marker nucleic acid mRNA production.

[0314] Alternatively, the screening method may include in vitro screening of a cell or tissue in which marker protein is detectable in cultured cells to an agent suspected of inhibiting production of the marker protein; and determining the level of the marker protein in the cells or tissue, wherein a decrease in the level of marker protein after exposure of the cells or tissue to the agent is indicative of inhibition of marker protein production.

[0315] The invention also encompasses in vivo methods of screening for agents which inhibit expression of the marker nucleic acids, comprising exposing a mammal having tumor cells in which marker mRNA or protein is detectable to an agent suspected of inhibiting production of marker mRNA or protein; and determining the level of marker mRNA or protein in tumor cells of the exposed mammal. A decrease in the level of marker mRNA or protein after exposure of the mammal to the agent is indicative of inhibition of marker nucleic acid expression.

[0316] Accordingly, the invention provides a method comprising incubating a cell expressing the marker nucleic acids (SEQ ID Nos:1-850) with a test compound and measuring the mRNA or protein level. The invention further provides a method for quantitatively determining the level of expression of the marker nucleic acids in a cell population, and a method for determining whether an agent is capable of increasing or decreasing the level of expression of the marker nucleic acids in a cell population. The method for determining whether an agent is capable of increasing or decreasing the level of expression of the marker nucleic acids in a cell population comprises the steps of (a) preparing cell extracts from control and agent-treated cell populations, (b) isolating the marker polypeptides from the cell extracts, (c) quantifying (e.g., in parallel) the amount of an immunocomplex formed between the marker polypeptide and an antibody specific to said polypeptide. The marker polypeptides of this invention may also be quantified by assaying for its bioactivity. Agents that induce increased the marker nucleic acid expression may be identified by their ability to increase the amount of immunocomplex formed in the treated cell as compared with the amount of he immunocomplex formed in the control bell. In a similar manner, agents that decrease expression of the marker nucleic acid may be identified by their ability to decrease the amount of the immunocomplex formed in the treated cell extract as compared to the control cell.

[0317] mRNA levels can be determined by Northern blot hybridization. mRNA levels can also be determined by methods involving PCR Other sensitive methods for measuring mRNA, which can be used in high throughput assays, e.g., a method using a DELFIA endpoint detection and quantification method, are described, e.g., in Webb and Hurskainen (1996) Journal of Biomolecular Screening 1:119. Marker protein levels can be determined by immunoprecipitations or immunohistochemistry using an antibody that specifically recognizes the protein product encoded by SEQ ID Nos:1-850.

[0318] Agents that are identified as active in the drug screening assay are candidates to be tested for their capacity to block cell proliferation activity. These agents would be useful for treating a disorder involving aberrant growth of cells, especially colon cells.

[0319] A variety of assay formats will suffice and, in light of the present disclosure, those not expressly described herein will nevertheless be comprehended by one of ordinary skill in the art. For instance, the assay can be generated in many different formats, and include assays based on cell-free systems, e.g., purified proteins or cell lysates, as well as cell-based assays which utilize intact cells.

[0320] In many drug screening programs which test libraries of compounds and natural extracts, high throughput assays are desirable in order to maximize the number of compounds surveyed in a given period of time. Assays of the present invention which are performed in cell-free systems, such as may be derived with purified or semi-purified proteins or with lysates, are often preferred as “primary” screens in that they can be generated to permit rapid development and relatively easy detection of an alteration in a molecular target which is mediated by a test compound. Moreover, the effects of cellular toxicity and/or bioavailability of the test compound can be generally ignored in the in vitro system, the assay instead being focused primarily on the effect of the drug on the molecular target as may be manifest in an alteration of binding affinity with other proteins or changes in enzymatic properties of the molecular target.

[0321] A. Use of Nucleic Acids as Probes in Mapping and in Tissue Profiling

### Probes

[0322] Polynucleotide probes as described above, e.g., comprising at least 12 contiguous nucleotides selected from the nucleotide sequence of an nucleic acid as shown in SEQ ID Nos. 1-850, preferably SEQ ID Nos. 1-383, even more preferably SEQ ID Nos. 1-127, or a sequence complementary thereto, are used for a variety of purposes, including identification of human chromosomes and determining transcription levels. Additional disclosure about preferred regions of the nucleic acid sequences is found in the accompanying tables.

[0323] The nucleotide probes are labeled, for example, with a radioactive, fluorescent, biotinylated, or chemiluminescent label, and detected by well known methods appropriate for the particular label selected. Protocols for hybridizing nucleotide probes to preparations of metaphase chromosomes are also well known in the art A nucleotide probe will hybridize specifically to nucleotide sequences in the chromosome preparations which are complementary to the nucleotide sequence of the probe. A probe that hybridizes specifically to an nucleic acid should provide a detection signal at least 5-, 10-, or 20-fold higher than the background hybridization provided with other unrelated sequences.

[0324] In a non-limiting example, commercial programs are available for identifying regions of chromosomes commonly associated with disease, such as cancer. Nucleic acids of the invention can be used to probe these regions. For example, if, through profile searching, a nucleic acid is identified as corresponding to a gene encoding a kinase, its ability to bind to a cancer-related chromosomal region will suggest its role as a kinase in one or more stages of tumor cell development/growth. Although some experimentation would be required to elucidate the role, the nucleic acid constitutes a new material for isolating a specific protein that has potential for developing a cancer diagnostic or therapeutic.

[0325] Nucleotide probes are used to detect expression of a gene corresponding to the nucleic acid. For example, in Northern blots, mRNA is separated electrophoretically and contacted with a probe. A probe is detected as hybridizing to an mRNA species of a particular size. The amount of hybridization is quantitated to determine relative amounts of expression, for example under a particular condition. Probes are also used to detect products of amplification by polymerase chain reaction. The products of the reaction are hybridized to the probe and hybrids are detected. Probes are used for in situ hybridization to cells to detect expression. Probes can also be used in vivo for diagnostic detection of hybridizing sequences. Probes are typically labeled with a radioactive isotope. Other types of detectable labels may be used such as chromophores, fluorophores, and enzymes.

[0326] Expression of specific mRNA can vary in different cell types and can be tissue specific. This variation of mRNA levels in different cell types can be exploited with nucleic acid probe assays to determine tissue types. For example, PCR, branched DNA probe assays, or blotting techniques utilizing nucleic acid probes substantially identical or complementary to nucleic acids of SEQ ID Nos. 1-850, preferably SEQ ID Nos. 1-383, even more preferably SEQ ID Nos. 1-127, or a sequence complementary thereto, can determine the presence or absence of target cDNA or mRNA.

[0327] Examples of a nucleotide hybridization assay are described in Urdea et al., PCT W092/02526 and Urdea et al., U.S. Pat. No. 5,124,246, both incorporated herein by reference. The references describe an example of a sandwich nucleotide hybridization assay.

[0328] Alternatively, the Polymerase Chain Reaction (PCR) is another means for detecting small amounts of target nucleic acids, as described in Mullis et al., Meth. Enzymol. (1987) 155:335-350; U.S. Pat. No. 4,683,195; and U.S. Pat. No. 4,683,202, all incorporated herein by reference. Two primer polynucleotides nucleotides hybridize with the target nucleic acids and are used to prime the reaction. The primers may be composed of sequence within or 3′ and 5′ to the polynucleotides of the Sequence Listing. Alternatively, if the primers are 3′ and 5′ to these polynucleotides, they need not hybridize to them or the complements. A thermostable polymerase creates copies of target nucleic acids from the primers using the original target nucleic acids as a template. After a large amount of target nucleic acids is generated by the polymerase, it is detected by methods such as Southern blots. When using the Southern blot method, the labeled probe will hybridize to a polynucleotide of the Sequence Listing or complement.

[0329] Furthermore, mRNA or cDNA can be detected by traditional blotting techniques described in Sambrook et al., Molecular Cloning: A Laboratory Manual” (New York, Cold Spring Harbor Laboratory, 1989). mRNA or cDNA generated from mRNA using a polymerase enzyme can be purified and separated using gel electrophoresis. The nucleic acids on the gel are then blotted onto a solid support, such as nitrocellulose. The solid support is exposed to a labeled probe and then washed to remove any unhybridized probe. Next, the duplexes containing the labeled probe are detected. Typically, the probe is labeled with radioactivity.

[0330] Mapping

[0331] Nucleic acids of the present invention are used to identify a chromosome on which the corresponding gene resides. Using fluorescence in situ hybridization (FISH) on normal metaphase spreads, comparative genomic hybridization allows total genome assessment of changes in relative copy number of DNA sequences. See Schwartz and Samad, Current Opinions in Biotechnology (1994) 8:70-74; Kallioniemi et al., Seminars in Cancer Biology (1993) 4:4146; Valdes and Tagle, Methods in Molecular Biology (1997) 68:1, Boultwood, ed., Human Press, Totowa, N.J.

[0332] Preparations of human metaphase chromosomes are prepared using standard cytogenetic techniques from human primary tissues or cell lines. Nucleotide probes comprising at least 12 contiguous nucleotides selected from the nucleotide sequence of SEQ ID Nos. 1-850, preferably SEQ ID Nos. 1-383, even more preferably SEQ ID Nos. 1-1 27, or a sequence complementary thereto, are used to identify the corresponding chromosome. The nucleotide probes are labeled, for example, with a radioactive, fluorescent, biotinylated, or chemiluminescent label, and detected by well known methods appropriate for the particular label selected. Protocols for hybridizing nucleotide probes to preparations of metaphase chromosomes are also well known in the art. A nucleotide probe will hybridize specifically to nucleotide sequences in the chromosome preparations that are complementary to the nucleotide sequence of the probe. A probe that hybridizes specifically to a target gene provides a detection signal at least 5-, 10-, or 20-fold higher than the background hybridization provided with unrelated coding sequences.

[0333] Nucleic acids are mapped to particular chromosomes using, for example, radiation hybrids or chromosome-specific hybrid panels. See Leach et al., Advances in Genetics, (1995) 33:63-99; Walter et al., Nature Genetics (1994) 7:22-28; Walter and Goodfellow, Trends in Genetics (1992) 9:352. Panels for radiation hybrid mapping are available from Research Genentics, Inc., Huntsville, Ala., USA. Databases for markers using various panels are available via the world wide web at http:/F/shgc-www.stanford.edu; and other locations. The statistical program RHMAP can be used to construct a map based on the data from radiation hybridization with a measure of the relative likelihood of one order versus another. RHMAP is available via the world wide web at http://www.sph.umich.edu/group/statgen/software.

[0334] Such mapping can be useful in identifying the function of the target gene by its proximity to other genes with known function. Function can also be assigned to the target gene when particular syndromes or diseases map to the same chromosome.

### Tissue Profiling

[0335] The nucleic acids of the present invention can be used to determine the tissue type from which a given sample is derived. For example, a metastatic lesion is identified by its developmental organ or tissue source by identifying the expression of a particular marker of that organ or tissue. If a nucleic acid is expressed only in a specific tissue type, and a metastatic lesion is found to express that nucleic acid, then the developmental source of the lesion has been identified. Expression of a particular nucleic acid is assayed by detection of either the corresponding mRNA or the protein product. Immunological methods, such as antibody staining, are used to detect a particular protein product. Hybridization methods may be used to detect particular mRNA species, including but not limited to in situ hybridization and Northern blotting.

### Use of Polymorphisms

[0336] A nucleic acid will be useful in forensics, genetic analysis, mapping, and diagnostic applications if the corresponding region of a gene is polymorphic in the human population. A particular polymorphic form of the nucleic acid may be used to either identify a sample as deriving from a suspect or rule out the possibility that the sample derives from the suspect. Any means for detecting a polymorphism in a gene are used, including but not limited to electrophoresis of protein polymorphic variants, differential sensitivity to restriction enzyme cleavage, and hybridization to an allele-specific probe.

[0337] B. Use of Nucleic Acids and Encoded Polypeptides to Raise Antibodies

[0338] Expression products of a nucleic acid, the corresponding mRNA or cDNA, or the corresponding complete gene are prepared and used for raising antibodies for experimental, diagnostic, and therapeutic purposes. For nucleic acids to which a corresponding gene has not been assigned, this provides an additional method of identifying the corresponding gene. The nucleic acid or related cDNA is expressed as described above, and antibodies are prepared. These antibodies are specific to an epitope on the encoded polypeptide, and can precipitate or bind to the corresponding native protein in a cell or tissue preparation or in a cell-free extract of an in vitro expression system.

[0339] Immunogens for raising antibodies are prepared by mixing the polypeptides encoded by the nucleic acids of the present invention with adjuvants. Alternatively, polypeptides are made as fusion proteins to larger immunogenic proteins. Polypeptides are also covalently linked to other larger immunogenic proteins, such as keyhole limpet hemocyanin. Immunogens are typically administered intradermally, subcutaneously, or intramuscularly. Immunogens are administered to experimental animals such as rabbits, sheep, and mice, to generate antibodies. Optionally, the animal spleen cells are isolated and fused with myeloma cells to form hybridomas which secrete monoclonal antibodies. Such methods are well known in the art. According to another method known in the art, the nucleic acid is administered directly, such as by intramuscular injection, and expressed in vivo. The expressed protein generates a variety of protein-specific immune responses, including production of antibodies, comparable to administration of the protein.

[0340] Preparations of polyclonal and monoclonal antibodies specific for nucleic acid-encoded proteins and polypeptides are made using standard methods known in the art. The antibodies specifically bind to epitopes present in the polypeptides encoded by a nucleic acid of SEQ ID Nos. 1-850, preferably SEQ ID Nos. 1-383, even more preferably SEQ ID Nos. 1-127, or a sequence complementary thereto. In another embodiment, the antibodies specifically bind to epitopes present in a polypeptide encoded by SEQ ID Nos. 1-850. Typically, at least about 6, 8, 10, or 12 contiguous amino acids are required to form an epitope. However, epitopes which involve non-contiguous amino acids may require more, for example, at least about 15, 25, or 50 amino acids. A short sequence of a nucleic acid may then be unsuitable for use as an epitope to raise antibodies for identifying the corresponding novel protein, because of the potential for cross-reactivity with a known protein. However, the antibodies may be useful for other purposes, particularly if they identify common structural features of a known protein and a novel polypeptide encoded by a nucleic acid of the invention.

[0341] Antibodies that specifically bind to human nucleic acid-encoded polypeptides should provide a detection signal at least about 5-, 10-, or 20-fold higher than a detection signal provided with other proteins when used in Western blots or other immunochemical assays. Preferably, antibodies that specifically bind nucleic acid T-encoded polypeptides do not detect other proteins in immunochemical assays and can immunoprecipitate nucleic acid-encoded proteins from solution.

[0342] To test for the presence of serum antibodies to the nucleic acid-encoded polypeptide in a human population, human antibodies are purified by methods well known in the art Preferably, the antibodies are affinity purified by passing antiserum over a column to which an nucleic acid-encoded protein, polypeptide, or fusion protein is bound. The bound antibodies can then be eluted from the column, for example using a buffer with a high salt concentration.

[0343] In addition to the antibodies discussed above, genetically engineered antibody derivatives are made, such as single chain antibodies.

[0344] Antibodies may be made by using standard protocols known in the art (See, for example, Antibodies: A Laboratory Manual ed. by Harlow and Lane (Cold Spring Harbor Press:1988)). A mammal, such as a mouse, hamster, or rabbit can be immunized with an immunogenic form of the peptide (e.g., a mammalian polypeptide or an antigenic fragment which is capable of eliciting an antibody response, or a fusion protein as described above).

[0345] In one aspect, this invention includes monoclonal antibodies that show a subject polypeptide is highly expressed in colorectal tissue or tumor tissue, especially colon cancer tissue or colon cancer-derived cell lines. Therefore, in one embodiment, this invention provides a diagnostic tool for the analysis of expression of a subject polypeptide in general, and in particular, as a diagnostic for colon cancer.

[0346] Techniques for conferring immunogenicity on a protein or peptide include conjugation to carriers or other techniques well known in the art. An immunogenic portion of a protein can be administered in the presence of adjuvant. The progress of immunization can be monitored by detection of antibody titers in plasma or serum. Standard ELISA or other immunoassays can be used with the immunogen as antigen to assess the levels of antibodies. In a preferred embodiment, the subject antibodies are immunospecific for antigenic determinants of a protein of a mammal, e.g., antigenic determinants of a protein encoded by one of SEQ ID Nos. 1-850 or closely related homologs (e.g., at least 90% identical, and more preferably at least 95% identical).

[0347] Following immunization of an animal with an antigenic preparation of a polypeptide, antisera can be obtained and, if desired, polyclonal antibodies isolated from the serum. To produce monoclonal antibodies, antibody-producing cells (lymphocytes) can be harvested from an immunized animal and fused by standard somatic cell fusion procedures with immortalizing cells such as myeloma cells to yield hybridoma cells. Such techniques are well known in the art, and include, for example, the hybridoma technique (originally developed by Kohler and Milstein, (1975) Nature, 256: 495-497), the human B cell hybridoma technique (Kozbar et al., (1 983) Immunology Today, 4: 72), and the EBV-hybridoma technique to produce human monoclonal antibodies (Cole et al., (1985) Monoclonal Antibodies and Cancer Therapy, Alan R. Liss, Inc. pp. 77-96). Hybridoma cells can be screened immunochemically for production of antibodies specifically reactive with a polypeptide of the present invention and monoclonal antibodies isolated from a culture comprising such hybridoma cells.

[0348] The term antibody as used herein is intended to include fragments thereof which are also specifically reactive with one of the subject polypeptides. Antibodies can be fragmented using conventional techniques and the fragments screened for utility in the same manner as described above for whole antibodies. For example, F(ab)₂ fragments can be generated by treating antibody with pepsin. The resulting F(ab)₂ fragment can be treated to reduce disulfide bridges to produce Fab fragments. The antibody of the present invention is further intended to include bispecific, single-chain, and chimeric and humanized molecules having affinity for a polypeptide conferred by at least one CDR region of the antibody. In preferred embodiments, the antibodies, the antibody further comprises a label attached thereto and able to be detected, (e.g., the label can be a radioisotope, fluorescent compound, chemiluminescent compound, enzyme, or enzyme co-factor).

[0349] Antibodies can be used, e.g., to monitor protein levels in an individual for determining, e.g., whether a subject has a disease or condition, such as colon cancer, associated with an aberrant protein level, or allowing determination of the efficacy of a given treatment regimen for an individual afflicted with such a disorder. The level of polypeptides may be measured from cells in bodily fluid, such as in blood samples.

[0350] Another application of antibodies of the present invention is in the immunological screening of cDNA libraries constructed in expression vectors such as gt11, gt18-23, ZAP, and ORF8. Messenger libraries of this type, having coding sequences inserted in the correct reading frame and orientation, can produce fusion proteins. For instance, gt11 will produce fusion proteins whose amino termini consist of β-galactosidase amino acid sequences and whose carboxyl termini consist of a foreign polypeptide. Antigenic epitopes of a protein, e.g., other orthologs of a particular protein or other paralogs from the same species, can then be detected with antibodies, as, for example, reacting nitrocellulose filters lifted from infected plates with antibodies. Positive phage detected by this assay can then be isolated from the infected plate. Thus, the presence of homologs can be detected and cloned from other animals, as can alternate isoforms (including splicing variants) from humans.

[0351] In another embodiment, a panel of monoclonal antibodies may be used, wherein each of the epitope's involved functions are represented by a monoclonal antibody. Loss or perturbation of binding of a monoclonal antibody in the panel would be indicative of a mutational attention of the protein and thus of the corresponding gene.

[0352] C. Differential Expression

[0353] The present invention also provides a method to identify abnormal or diseased tissue in a human. For nucleic acids corresponding to profiles of protein families as described above, the choice of tissue may be dictated by the putative biological function. The expression of a gene corresponding to a specific nucleic acid is compared between a first tissue that is suspected of being diseased and a second, normal tissue of the human. The normal tissue is any tissue of the human, especially those that express the target gene including, but not limited to, brain, thymus, testis, heart, prostate, placenta, spleen, small intestine, skeletal muscle, pancreas, and the mucosal lining of the colon.

[0354] The tissue suspected of being abnormal or diseased can be derived from a different tissue type of the human, but preferably it is derived from the same tissue type; for example an intestinal polyp or other abnormal growth should be compared with normal intestinal tissue. A difference between the target gene, mRNA, or protein in the two tissues which are compared, for example in molecular weight, amino acid or nucleotide sequence, or relative abundance, indicates a change in the gene, or a gene which regulates it, in the tissue of the human that was suspected of being diseased.

[0355] The target genes in the two tissues are compared by any means known in the art. For example, the two genes are sequenced, and the sequence of the gene in the tissue suspected of being diseased is compared with the gene sequence in the normal tissue. The target genes, or portions thereof, in the two tissues are amplified, for example using nucleotide primers based on the nucleotide sequence shown in the Sequence Listing, using the polymerase chain reaction. The amplified genes or portions of genes are hybridized to nucleotide probes selected from a corresponding nucleotide sequence shown SEQ ID No. 1-850. A difference in the nucleotide sequence of the target gene in the tissue suspected of being diseased compared with the normal nucleotide sequence suggests a role of the nucleic acid-encoded proteins in the disease, and provides a lead for preparing a therapeutic agent. The nucleotide probes are labeled by a variety of methods, such as radiolabeling, biotinylation, or labeling with fluorescent or chemiluminescent tags, and detected by standard methods known in the art.

[0356] Alternatively, target mRNA in the two tissues is compared. PolyA⁺ RNA is isolated from the two tissues as is known in the art. For example, one of skill in the art can readily determine differences in the size or amount of target mRNA transcripts between the two tissues using Northern blots and nucleotide probes selected from the nucleotide sequence shown in the Sequence Listing. Increased or decreased expression of a target mRNA in a tissue sample suspected of being diseased, compared with the expression of the same target mRNA in a normal tissue, suggests that the expressed protein has a role in the disease, and also provides a lead for preparing a therapeutic agent.

[0357] Any method for analyzing proteins is used to compare two nucleic acid-encoded proteins from matched samples. The sizes of the proteins in the two tissues are compared, for example, using antibodies of the present invention to detect nucleic acid-encoded proteins in Western blots of protein extracts from the two tissues. Other changes, such as expression levels and subcellular localization, can also be detected immunologically, using antibodies to the corresponding protein. A higher or lower level of nucleic acid-encoded protein expression in a tissue suspected of being diseased, compared with the same nucleic acid-encoded protein expression level in a normal tissue, is indicative that the expressed protein has a role in the disease, and provides another lead for preparing a therapeutic agent.

[0358] Similarly, comparison of gene sequences or of gene expression products, e.g., mRNA and protein, between a human tissue that is suspected of being diseased and a normal tissue of a human, are used to follow disease progression or remission in the human. Such comparisons of genes, mRNA, or protein are made as described above.

[0359] For example, increased or decreased expression of the target gene in the tissue suspected of being neoplastic can indicate the presence of neoplastic cells in the tissue. The degree of increased expression of the target gene in the neoplastic tissue relative to expression of the gene in normal tissue, or differences in the amount of increased expression of the target gene in the neoplastic tissue over time, is used to assess the progression of the neoplasia in that tissue or to monitor the response of the neoplastic tissue to a therapeutic protocol over time.

[0360] The expression pattern of any two cell types can be compared, such as low and high metastatic tumor cell lines, or cells from tissue which have and have not been exposed to a therapeutic agent A genetic predisposition to disease in a human is detected by comparing an target gene, mRNA, or protein in a fetal tissue With a normal target gene, mRNA, or protein. Fetal tissues that are used for this purpose include, but are not limited to, amniotic fluid, chorionic villi, blood, and the blastomere of an in vitro-fertilized embryo. The comparable normal target gene is obtained from any tissue. The mRNA or protein is obtained from a normal tissue of a human in which the target gene is expressed. Differences such as alterations in the nucleotide sequence or size of the fetal target gene or mRNA, or alterations in the molecular weight, amino acid sequence, or relative abundance of fetal target protein, can indicate a germline mutation in the target gene of the fetus, which indicates a genetic predisposition to disease.

[0361] D. Use of Nucleic Acids, and Encoded Polypeptides to Screen for Peptide Analogs and Antagonists

[0362] Polypeptides encoded by the instant nucleic acids, e.g., SEQ ID Nos. 1-850, preferably SEQ ID Nos. 1-383, even more preferably SEQ ID Nos. 1-127, or a sequence complementary thereto, and corresponding full length genes can be used to screen peptide libraries to identify binding partners, such as receptors, from among the encoded polypeptides.

[0363] A library of peptides may be synthesized following the methods disclosed in U.S. Pat. No. 5,010,175, and in PCT WO 91/17823. As described below in brief, one prepares a mixture of peptides, which is then screened to identify the peptides exhibiting the desired signal transduction and receptor binding activity. In the '175 method, a suitable peptide synthesis support (e.g., a resin) is coupled to a mixture of appropriately protected, activated amino acids. The concentration of each amino acid in the reaction mixture is balanced or adjusted in inverse proportion to its coupling reaction rate so that the product is an equimolar mixture of amino acids coupled to the starting resin The bound amino acids are then deprotected, and reacted with another balanced amino acid mixture to form an equimolar mixture of all possible dipeptides. This process is repeated until a mixture of peptides of the desired length (e.g., hexamers) is formed. Note that one need not include all amino acids in each step: one may include only one or two amino acids in some steps (e.g., where it is known that a particular amino acid is essential in a given position), thus reducing the complexity of the mixture. After the synthesis of the peptide library is completed, the mixture of peptides is screened for binding to the selected polypeptide. The peptides are then tested for their ability to inhibit or enhance activity. Peptides exhibiting the desired activity are then isolated and sequenced.

[0364] The method described in WO 91/17823 is similar. However, instead of reacting the synthesis resin with a mixture of activated amino acids, the resin is divided into twenty equal portions (or into a number of portions corresponding to the number of different amino acids to be added in that step), and each amino acid is coupled individually to its portion of resin. The resin portions are then combined, mixed, and again divided into a number of equal portions for reaction with the second amino acid. In this manner, each reaction may be easily driven to completion. Additionally, one may maintain separate “subpools” by treating portions in parallel, rather than combining all resins at each step. This simplifies the process of determining which peptides are responsible for any observed receptor binding or signal transduction activity.

[0365] In such cases, the subpools containing, e.g., 1-2,000 candidates each are exposed to one or more polypeptides of the invention. Each subpool that produces a positive result is then resynthesized as a group of smaller subpools (sub-subpools) containing, e.g., 20-100 candidates, and reassayed. Positive sub-subpools may be resynthesized as individual compounds, and assayed finally to determine the peptides that exhibit a high binding constant. These peptides can be tested for their ability to inhibit or enhance the native activity. The methods described in WO 91/7823 and U.S. Pat. No. 5,194,392 (herein incorporated by reference) enable the preparation of such pools and subpools by automated techniques in parallel, such that all synthesis and resynthesis may be performed in a matter of days.

[0366] Peptide agonists or antagonists are screened using any available method, such as signal transduction, antibody binding, receptor binding, mitogenic assays, chemotaxis assays, etc. The methods described herein are presently preferred. The assay conditions ideally should resemble the conditions under which the native activity is exhibited in vivo, that is, under physiologic pH, temperature, and ionic strength. Suitable agonists or antagonists will exhibit strong inhibition or enhancement of the native activity at concentrations that do not cause toxic side effects in the subject. Agonists or antagonists that compete for binding to the native polypeptide may require concentrations equal to or greater than the native concentration, while inhibitors capable of binding irreversibly to the polypeptide may be added in concentrations on the order of the native concentration.

[0367] The end results of such screening and experimentation will be at least one novel polypeptide binding partner, such as a receptor, encoded by a nucleic acid of the invention, and at least one peptide agonist or antagonist of the novel binding partner. Such agonists and antagonists can be used to modulate, enhance, or inhibit receptor function in cells to which the receptor is native, or in cells that possess the receptor as a result of genetic engineering. Further, if the novel receptor shares biologically important characteristics with a known receptor, information about agonist/antagonist binding may help in developing improved agonists/antagonists of the known receptor.

[0368] E. Pharmaceutical Compositions and Therapeutic Uses

[0369] Pharmaceutical compositions can comprise polypeptides, antibodies, or polynucleotides of the claimed invention. The pharmaceutical compositions will comprise a therapeutically effective amount of either polypeptides, antibodies, or polynucleotides of the claimed invention.

[0370] The term “therapeutically effective amount” as used herein refers to an amount of a therapeutic agent to treat, ameliorate, or prevent a desired disease or condition, or to exhibit a detectable therapeutic or preventative effect. The effect can be detected by, for example, chemical markers or antigen levels. Therapeutic effects also include reduction in physical-symptoms, such as decreased body temperature. The precise effective amount for a subject will depend upon the subject's size and health, the nature and extent of the condition, and the therapeutics or combination of therapeutics selected for administration. Thus, it is not useful to specify an exact effective amount in advance. However, the effective amount for a given situation can be determined by routine experimentation and is within the judgment of the clinician.

[0371] For purposes of the present invention, an effective dose will be from about 0.01 mg/kg to 50 mg/kg or 0.05 mg/kg to about 10 mg/kg of the DNA constructs in the individual to which it is administered.

[0372] A pharmaceutical composition can also contain a pharmaceutically acceptable carrier. The term “pharmaceutically acceptable carrier” refers to a carrier for administration of a therapeutic agent, such as antibodies or a polypeptide, genes, and other therapeutic agents. The term refers to any pharmaceutical carrier that does not itself induce the production of antibodies harmful to the individual receiving the composition, and which may be administered without undue toxicity. Suitable carriers may be large, slowly metabolized macromolecules such as proteins, polysaccharides, polylactic acids, polyglycolic acids, polymeric amino acids, amino acid copolymers, and inactive virus particles. Such carriers are well known to those of ordinary skill in the art.

[0373] Pharmaceutically acceptable salts can be used therein, for example, mineral acid salts such as hydrochlorides, hydrobromides, phosphates, sulfates, and the like; and the salts of organic acids such as acetates, propionates, malonates, benzoates, and the like. A thorough discussion of pharmaceutically acceptable excipients is available in Remington's Pharmaceutical Sciences (Mack Pub. Co., N.J. 1991).

[0374] Pharmaceutically acceptable carriers in therapeutic compositions may contain liquids such as water, saline, glycerol and ethanol. Additionally, auxiliary substances, such as wetting or emulsifying agents, pH buffering substances, and the like, may be present in such vehicles. Typically, the therapeutic compositions are prepared as injectables, either as liquid solutions or suspensions; solid forms suitable for solution in, or suspension in, liquid vehicles prior to injection may also be prepared. Liposomes are included within the definition of a pharmaceutically acceptable carrier.

### Delivery Methods

[0375] Once formulated, the nucleic acid compositions of the invention can be (1) administered directly to the subject; (2) delivered ex vivo, to cells derived from the subject; or (3) delivered in vitro for expression of recombinant proteins.

[0376] Direct delivery of the compositions will generally be accomplished by injection, either subcutaneously, intraperitoneally, intravenously or intramuscularly, or delivered to the interstitial space of a tissue. The compositions can also be administered into a tumor or lesion. Other modes of administration include oral and pulmonary administration, suppositories, and transdermal applications, needles, and gene guns or hyposprays. Dosage treatment may be a single dose schedule or a multiple dose schedule.

[0377] Methods for the ex vivo delivery and reimplantation of transformed cells into a subject are known in the art and described in e.g., International Publication No. WO 93/14778. Examples of cells useful in ex vivo applications include, for example, stem cells, particularly hematopoetic, lymph cells, macrophages, dendritic cells, or tumor cells.

[0378] Generally, delivery of nucleic acids for both ex vivo and in vitro applications can be accomplished by, for example, dextran-mediated transfection, calcium phosphate precipitation, polybrene mediated transfection, protoplast fusion, electroporation, encapsulation of the polynucleotide(s) in liposomes, and direct microinjection of the DNA into nuclei, all well known in the art.

[0379] Once a subject gene has been found to correlate with a proliferative disorder, such as neoplasia, dysplasia, and hyperplasia, the disorder may be amenable to treatment by administration of a therapeutic agent based on the nucleic acid or corresponding polypeptide.

[0380] Preparation of antisense polypeptides is discussed above. Neoplasias that are treated with the antisense composition include, but are not limited to, cervical cancers, melanomas, colorectal adenocarcinomas, Wilms' tumor, retinoblastoma, sarcomas, myosarcomas, lung carcinomas, leukemias, such as chronic myelogenous leukemia, promyelocytic leukemia, monocytic leukemia, and myeloid leukemia, and lymphomas, such as histiocytic lymphoma. Proliferative disorders that are treated with the therapeutic composition include disorders such as anhydric hereditary ectodermal dysplasia, congenital alveolar dysplasia, epithelial dysplasia of the cervix, fibrous dysplasia of bone, and mammary dysplasia. Hyperplasias, for example, endometrial, adrenal, breast, prostate, or thyroid hyperplasias or pseudoepitheliomatous hyperplasia of the skin, are treated with antisense therapeutic compositions. Even in disorders in which mutations in the corresponding gene are not implicated, downregulation or inhibition of nucleic acid-related gene expression can have therapeutic application. For example, decreasing nucleic acid-related gene expression can help to suppress tumors in which enhanced expression of the gene is implicated.

[0381] Both the dose of the antisense composition and the means of administration are determined based on the specific qualities of the therapeutic composition, the condition, age, and weight of the patient, the progression of the disease, and other relevant factors. Administration of the therapeutic antisense agents of the invention includes local or systemic administration, including injection, oral administration, particle gun or catheterized administration, and topical administration. Preferably, the therapeutic antisense composition contains an expression construct comprising a promoter and a polynucleotide segment of at least about 12, 22, 25, 30, or 35 contiguous nucleotides of the antisense strand of a nucleic acid. Within the expression construct, the polynucleotide segment is located downstream from the promoter, and transcription of the polynucleotide segment initiates at the promoter.

[0382] Various methods are used to administer the therapeutic composition directly to a specific site in the body. For example, a small metastatic lesion is located and the therapeutic composition injected several times in several different locations within the body of tumor. Alternatively, arteries which serve a tumor are identified, and the therapeutic composition injected into such an artery, in order to deliver the composition directly into the tumor. A tumor that has a necrotic center is aspirated and the composition injected directly into the now empty center of the tumor. The antisense composition is directly administered to the surface of the tumor, for example, by topical application of the composition. X-ray imaging is used to assist in certain of the above delivery methods.

[0383] Receptor-mediated targeted delivery of therapeutic compositions containing an antisense polynucleotide, subgenomic polynucleotides, or antibodies to specific tissues is also used. Receptor-mediated DNA delivery techniques are described in, for example, Findeis et al., Trends in Biotechnol. (1993) 11:202-205; Chiou et al., (1994) Gene Therapeutics: Methods And Applications Of Direct Gene Transfer (J. A. Wolff, ed.); Wu & Wu, J. Biol. Chem. (1988) 263:621-24; Wu et al., J: Biol. Chem. (1994) 269:54246; Zenke et al., Proc. Natl. Acad. Sci. (USA) (1990) 87:3655-59; Wu et al., J. Biol. Chem. (1991) 266:33842. Preferably, receptor-mediated targeted delivery of therapeutic compositions containing antibodies of the invention is used to deliver the antibodies to specific tissue.

[0384] Therapeutic compositions containing antisense subgenomic polynucleotides are administered in a range of about 100 ng to about 200 mg of DNA for local administration in a gene therapy protocol. Concentration ranges of about 500 ng to about 50 mg, about 1 mg to about 2 mg, about 5 mg to about 500 mg, and about 20 mg to about 100 mg of DNA can also be used during a gene therapy protocol. Factors such as method of action and efficacy of transformation and expression are considerations which will affect the dosage required for ultimate efficacy of the antisense subgenomic nucleic acids. Where greater expression is desired over a larger area of tissue, larger amounts of antisense subgenomic nucleic acids or the same amounts readministered in a successive protocol of administrations, or several administrations to different adjacent or close tissue portions of, for example, a tumor site, may be required to effect a positive therapeutic outcome. In all cases, routine experimentation in clinical trials will determine specific ranges for optimal therapeutic effect. A more complete description of gene therapy vectors, especially retroviral vectors, is contained in U.S. Serial No. 08/869,309, which is expressly incorporated herein, and in section F below.

[0385] For genes encoding polypeptides or proteins with anti-inflammatory activity, suitable use, doses, and administration are described in U.S. Pat. No. 5,654,173, incorporated herein by reference. Therapeutic agents also include antibodies to proteins and polypeptides encoded by the subject nucleic acids, as described in U.S. Pat. No. 5,654,173.

[0386] F. Gene Therapy

[0387] The therapeutic nucleic acids of the present invention may be utilized in gene delivery vehicles. The gene delivery vehicle may be of viral or non-viral origin (see generally, Jolly, Cancer Gene Therapy (1994) 1:51-64; Kimura, Human Gene Therpay (1994) 5:845-852; Connelly, Human Gene Therapy (1995) 1:185-193; and Kaplitt, Nature Genetics (1994) 6:148-153). Gene therapy vehicles for delivery of constructs including a coding sequence of a therapeutic of the invention can be administered either locally or systemically. These constructs can utilize viral or non-viral vector approaches. Expression of such coding sequences can be induced using endogenous mammalian or heterologous promoters. Expression of the coding sequence can be either constitutive or regulated.

[0388] The present invention can employ recombinant retroviruses which are constructed to carry or express a selected nucleic acid molecule of interest. Retrovirus vectors that can be employed include those described in EP 0 415 731; WO 90/07936; WO 94/03622; WO 93/25698; WO 93/25234; U.S. Pat. No. 5,219,740; WO 93/11230; WO 93/10218; Vile and Hart, Cancer Res. (1993) 53:3860-3864; Vile and Hart, Cancer Res. (1993) 53:962-967; Ram et al., Cancer Res. (1993) 53:83-88; Takamiya et al., J. Neurosci. Res. (1992) 33:493-503; Baba et al., J. Neurosurg. (1993) 79:729-735; U.S. Pat. No. 4,777,127; GB Patent No. 2,200,651; and EP 0 345 242. Preferred recombinant retroviruses include those described in WO 91/02805.

[0389] Packaging cell lines suitable for use with the above-described retroviral vector constructs may be readily prepared (see PCT publications WO 95/30763 and WO 92/05266), and used to create producer cell lines (also termed vector cell lines) for the production of recombinant vector particles. Within particularly preferred embodiments of the invention, packaging cell lines are made from human (such as HT1080 cells) or mink parent cell lines, thereby allowing production of recombinant retroviruses that can survive inactivation in human serum.

[0390] The present invention also employs alphavirus-based vectors that can function as gene delivery vehicles. Such vectors can be constructed from a wide variety of alphaviruses, including, for example, Sindbis virus vectors, Semliki forest virus (ATCC VR-67; ATCC VR-1247), Ross River virus (ATCC VR-373; ATCC VR-1246) and Venezuelan equine encephalitis virus (ATCC VR-923; ATCC VR-1250; ATCC VR 1249; ATCC VR-532). Representative examples of such vector systems include those described in U.S. Pat. Nos. 5,091,309; 5,217,879; and 5,185,440; and PCT Publication Nos. WO 92/10578; WO 94/21792; WO 95/27069; WO 95/27044; and WO 95/07994.

[0391] Gene delivery vehicles of the present invention can also employ parvovirus such as adeno-associated virus (AAV) vectors. Representative examples include the AAV vectors disclosed by Srivastava in WO 93/09239, Samulski et al., J. Vir. (1989) 63:3822-3828; Mendelson et al., Virol. (1988) 166:154-165; and Flotte et al., PNAS (1993) 90:10613-10617.

[0392] Representative examples of adenoviral vectors include those described by Berkner, Biotechniques (1988) 6:616-627; Rosenfeld et al., Science (1991) 252:431-434; WO 93/19191; Kolls et al., PNAS (1994) 91:215-219; Kass-Eisler et al., PNAS (1993) 90:11498-11502; Guzman et al., Circulation (1993) 88:2838-2848; Guzman et al., Cir. Res. (1993) 73:1202-1207; Zabner et al., Cell (1993) 75:207-216; Li et al., Hum. Gene Ther. (1993) 4:403-409; Cailaud et al., Eur. J. Neurosci. (1993) 5:1287-1291; Vincent et al., Nat. Genet. (1993) 5:130-134; Jaffe et al., Nat. Genet. (1992) 1:372-378; and Levrero et al., Gene (1991) 101:195-202. Exemplary adenoviral gene therapy vectors employable in this invention also include those described in WO 94/12649, WO 93/03769; WO 93/19191; WO 94/28938; WO 95/11984 and WO 95/00655. Administration of DNA linked to killed adenovirus as described in Curiel, Hum. Gene Ther. (1992) 3:147-154 may be employed.

[0393] Other gene delivery vehicles and methods may be employed, including polycationic condensed DNA linked or unlinked to killed adenovirus alone, for example Curiel, Hum. Gene Ther. (1992) 3:147-154; ligand linked DNA, for example see Wu, J. Biol. Chem. (1989) 264:16985-16987; eukaryotic cell delivery vehicles cells, for example see U.S. Ser. No. 08/240,030, filed May 9,1994, and U.S. Ser. No. 08/404,796; deposition of photopolymerized hydrogel materials; hand-held gene transfer particle gun, as described in U.S. Pat. No. 5,149,655; ionizing radiation as described in U.S. Pat. No. 5,206,152 and in WO 92/11033; nucleic charge neutralization or fusion with cell membranes. Additional approaches are described in Philip, Mol. Cell Biol. (1994) 14:2411-2418, and in Woffendin, Proc. Natl. Acad. Sci. (1994)91:1581-1585.

[0394] Naked DNA may also be employed. Exemplary naked DNA introduction methods are described in WO 90/11092 and U.S. Pat. No. 5,580,859. Uptake efficiency may be improved using biodegradable latex beads. DNA coated latex beads are efficiently transported into cells after endocytosis initiation by the beads. The method may be improved further by treatment of the beads to increase hydrophobicity and thereby facilitate disruption of the endosome and release of the DNA into the cytoplasm. Liposomes that can act as gene delivery vehicles are described in U.S. Pat. No.5,422,120, PCT Nos. WO 95/13796, WO 94/23697, and WO 91/14445, and EP No. 0 524 968.

[0395] Further non-viral delivery suitable for use includes mechanical delivery systems such as the approach described in Woffendin et al., Proc. Natl. Acad. Sci. USA (1994) 91(24):11581-11585. Moreover, the coding sequence and the product of expression of such can be delivered through deposition of photopolymerized hydrogel materials. Other conventional methods for gene delivery that can be used for delivery of the coding sequence include, for example, use of hand-held gene transfer particle gun, as described in U.S. Pat. No. 5,149,655; use of ionizing radiation for activating transferred gene, as described in U.S. Pat. No. 5,206,152 and PCT No. WO 92111033.

[0396] G. Transgenic Animals

[0397] One aspect of the present invention relates to transgenic non-human animals having germline and/or somatic cells in which the biological activity of one or more genes are altered by a chromosomally incorporated transgene.

[0398] In a preferred embodiments, the transgene encodes a mutant protein, such as dominant negative protein which antagonizes at least a portion of the biological function of a wild-type protein.

[0399] Yet another preferred transgenic animal includes a transgene encoding an antisense transcript which, when transcribed from the transgene, hybridizes with a gene or a mRNA transcript thereof, and inhibits expression of the gene.

[0400] In one embodiment, the present invention provides a desired non-human animal or an animal (including human) cell which contains a predefined, specific and desired alteration rendering the non-human animal or animal cell predisposed to cancer. Specifically, the invention pertains to a genetically altered non-human animal (most preferably, a mouse), or a cell (either non-human animal or human) in culture, that is defective in at least one of two alleles of a tumor-suppressor gene. The inactivation of at least one of these tumor suppressor alleles results in an animal with a higher susceptibility to tumor induction or other proliferative or differentiative disorders, or disorders marked by aberrant signal transduction, e.g., from a cytokine or growth factor. A genetically altered mouse of this type is able to serve as a useful model for hereditary cancers and as a test animal for carcinogen studies. The invention additionally pertains to the use of such non-human animals or animal cells, and their progeny in research and medicine.

[0401] Furthermore, it is contemplated that cells of the transgenic animals of the present invention can include other transgenes, e.g., which alter the biological activity of a second tumor suppressor gene or an oncogene. For instance, the second transgene can functionally disrupt the biological activity of a second tumor suppressor gene, such as p53, p73, DCC, p21^{ciP1}, p27^{kiP1}, Rb, Mad or E2F. Alternatively, the second transgene can cause overexpression or loss of regulation of an oncogene, such as ras, myc, a cdc25 phosphatase, Bc1-2, Bc1-6, a transforming growth factor, neu, int-3, polyoma virus middle T antigen, SV40 large T antigen, a papillomaviral E6 protein, a papillomaviral E7 protein, CDK4, or cyclin D1.

[0402] A preferred transgenic non-human animal of the present invention has germline and/or somatic cells in which one or more alleles of a gene are disrupted by a chromosomally incorporated transgene, wherein the transgene includes a marker sequence providing a detectable signal for identifying the presence of the transgene in cells of the transgenic animal, and replaces at least a portion of the gene or is inserted into the gene or disrupts expression of a wild-type protein.

[0403] Still another aspect of the present invention relates to methods for generating non-human animals and stem cells having a functionally disrupted endogenous gene. In a preferred embodiment, the method comprises the steps of:

[0404] (i) constructing a transgene construct including (a) a recombination region having at least a portion of the gene, which recombination region directs recombination of the transgene with the gene, and (b) a marker sequence which provides a detectable signal for identifying the presence of the transgene in a cell;

[0405] (ii) transfering the transgene into stem cells of a non-human animal;

[0406] (iii) selecting stem cells having a correctly targeted homologous recombination between the transgene and the gene;

[0407] (iv) transfering cells identified in step (iii) into a non-human blastocyst and implanting the resulting chimeric blastocyst into a non-human female; and

[0408] (v) collecting offspring harboring an endogenous gene allele having the correctly targeted recombination.

[0409] Yet another aspect of the invention provides a method for evaluating the carcinogenic potential of an agent by (i) contacting a transgenic animal of the present invention with a test agent, and (ii) comparing the number of transformed cells in a sample from the treated animal with the number of transformed cells in a sample from an untreated transgenic animal or transgenic animal treated with a control agent. The difference in the number of transformed cells in the treated animal, relative to the number of transformed cells in the absence of treatment with a control agent, indicates the carcinogenic potential of the test compound.

[0410] Another aspect of the invention provides a method of evaluating an anti-proliferative activity of a test compound. In preferred embodiments, the method includes contacting a transgenic animal of the present invention, or a sample of cells from such animal, with a test agent, and determining the number of transformed cells in a specimen from the transgenic animal or in the sample of cells. A statistically significant decrease in the number of transformed cells, relative to the number of transformed cells in the absence of the test agent, indicates the test compound is a potential anti-proliferative agent.

[0411] The practice of the present invention will employ, unless otherwise indicated, conventional techniques of cell biology, cell culture, molecular biology, transgenic biology, microbiology, recombinant DNA, and immunology, which are within the skill of the art. Such techniques are explained fully in the literature. See, for example, Molecular Cloning A Laboratory Manual, 2nd Ed., ed. by Sambrook, Fritsch and Maniatis (Cold Spring Harbor Laboratory Press:1989); DNA Cloning, Volumes I and II (D. N. Glover ed., 1985); Oligonucleotide Synthesis (M. J. Gait ed., 1984); Mullis et al. U.S. Pat. No. 4,683,195; Nucleic Acid Hybridization (B. D. Hames & S. J. Higgins eds. 1984); Transcription And Translation (B. D. Hames & S. J. Higgins eds. 1984); Culture Of Animal Cells (R. I. Freshney, Alan R. Liss, Inc., 1987); Immobilized Cells And Enzymes (IRL Press, 1986); B. Perbal, A Practical Guide To Molecular Cloning (1984); the treatise, Methods In Enzymology (Academic Press, Inc., N.Y.); Gene Transfer Vectors For Mammalian Cells (J. H. Miller and M. P. Calos eds., 1987, Cold Spring Harbor Laboratory); Methods In Enzymology, Vols. 154 and 155 (Wu et al. eds.), Immunochemical Methods In Cell And Molecular Biology (Mayer and Walker, eds., Academic Press, London, 1987); Handbook Of Experimental Immunology, Volumes I-IV (D. M. Weir and C. C. Blackwell, eds., 1986); Manipulating the Mouse Embryo, (Cold Spring Harbor Laboratory Press, Cold Spring Harbor, N.Y., 1986).

[0412] As mentioned above, the sequences described herein are believed to have particular utility in regards to colon cancer. However, they may also be useful with other types of cancers and other disease states.

[0413] The present invention will now be illustrated by reference to the following examples which set forth particularly advantageous embodiments. However, it should be noted that these embodiments are illustrative and are not to be construed as restricting the invention in any way.

[0414] XI. Examples

[0415] A. Identification of differentially expressed sequences in the SW480 library

### Description of the SW480 Library

[0416] SEQ ID NO 1-850 were derived from the SW480 library. The SW480 library is a normalized, subtracted cDNA library that was generated from the RNA derived from colon cancer cell line SW480 and normal human colon tissue. Human colorectal adenocarcinoma (cancer) cell line SW480; ATCC #CCL228.(Leibovitz et al., Cancer Research 36:4562-4569, 1976) was used to generate double-stranded cDNA that was subsequently used as the tester sample for the subtraction experiment. Poly A⁺RNA from normal human colon tissue (purchased from OriGene Technologies, Inc. Rockville, Md.) was used was used to generate double-stranded cDNA that was used as the driver sample for the subtraction experiment.

[0417] The growth conditions of the driver and tester sources in this library were different as SW480 is a rapidly growing cell line and may have higher cellular metabolism. Therefore some of the differential expression in this library might be due to non-relevant growth effects of the two sources of tissue.

### Construction of the SW480 Library

[0418] Double-stranded cDNA was generated using the Clontech SMART PCR cDNA Synthesis Kit (purchased from Clontech Laboratories Inc, Palo Alto, Calif.) following the manufacturer's instructions. Subtraction hybridization steps were performed in accordance with the manufacturer's instructions for the Clontech PCR-Select kit (purchased from Clontech Laboratories Inc, Palo Alto, Calif.). The subtracted cDNAs were then directly inserted into a T/A cloning vector (TOPO TA Cloning Kit, Invitrogen Corporation, Carlsbad, Calif.) according to manufacturer's instructions, transformed into E. coli, and plated onto LB-amp plates, containing X-gal and IPTG. 1248 bacterial colonies were picked, transferred to LB-amp broth and propagated. Plasmids were isolated using column chromatography (QIAprep 96 Turbo Miniprep Kits, Qiagen Corporation, Valencia, Calif.) on the QIAGEN Biorobot 9600.

### Initial Validation of Differential Expression

[0419] The inserts from subtracted clones were amplified by PCR and 10 ul of the PCR reaction product was run on a 2.0% agarose gel for 2 hr at 100 volts. The gel was blotted onto a nylon membrane according to standard methods and hybridized as follows:50 ng aliquots of the RSA1 cut SW480 and normal colon cDNA libraries were labeled with [α-³²P] dCTP by Prime-It RmT Random Primer labeling kit (Stratagene, La Jolla, Calif.). Nylon membranes containing the PCR amplified DNA from the SW480 library clones were hybridized to the labeled probes at 4×10⁶ cpm/ml in Express hybridization buffer (Clonetech) at 68° C. for approximately 16 hours. The membranes were subjected to stringent washes (0.1×SSC; 0.1% SDS) done at 68° C. and were then exposed to phosphorimager screens. The screens were analyzed using Molecular Dynamics ImageQuant software. Clones that exhibited a stronger hybridization signal with the SW480 probe relative to the normal colon probe were deemed to be differentially expressed.

### Validation of Differential Expression in Colon Cancer

[0420] To validate that the differentially expressed sequences found in this library were specific to colon cancer, the clones were screened with cDNAs prepared from a colon cancer specific library, Delaware (DE), and a normal tissue specific library Maryland (MD).

[0421] The DE library is specific for sequences expressed in colon cancer [proximal and distal Dukes' B, microsatellite instibility negative (MSI-)] but not expressed in normal tissues, including colon. This colon cancer tissue specific cDNA library, was made using pooled colon cancer cDNA as tester (tumor tissue cDNA pooled from eight patients with either proximal stage B MSI- or distal stage B MSI- cancers). The driver cDNA consisted a combination of cDNAs made from 50% normal colon tissue and a pool of peripheral blood leukocytes (PBL), and normal liver, spleen, lung, kidney, heart, small intestine, skeletal muscle, and prostate tissue cDNAs as the remaining 50% of the driver.

[0422] The MD library is specific for sequences expressed in normal tissue, but not expressed in proximal and distal Dukes' B, MSI- colon cancers. The tester cDNA in this case was made up of 50% normal colon tissue cDNA while the other 50% was made up of PBL, liver, spleen, lung, kidney, heart, small intestine, skeletal muscle, and prostate tissue cDNAs. The driver for this library was generated from pools of proximal stage B, MSI- and distal stage B, MSI- tumor tissue cDNAs obtained from eight cancer patients.

[0423] SW 480 clones that hybridized with the DE probe, but hybridized to a lesser degree (or not at all) to the MD probe were determined to be differentially expressed. This confirmation of differential expression is additional evidence that the up regulation of the individual clones is related to colon cancer.

### Sequencing and Analysis of Differentially Expressed Clones

[0424] The nucleotide sequence of the inserts from clones shown to be differentially expressed was determined by single-pass sequencing from either the T7 or M13 promoter sites using fluorescently labeled dideoxynucleotides via the Sanger sequencing method. Sequences were analyzed according to methods described in the text (XI., Examples; B. Results of Public Database Search).

[0425] Each nucleic acid represents sequence from at least a partial mRNA transcript. The nucleic acids of the invention were assigned a sequence identification number (see attachments). The DNA sequences are provided in the attachments containing the sequences.

[0426] Of the 1248 colonies examined, 826 individual clones were found to be differentially expressed using the SW480 and normal colon probes. Of these, 681 were found to be differentially expressed using the DE and MD tissue probes. 145 clones that previously showed differential expression with the SW480 and normal colon probes did not show differential expression with the DE and MD probes. 363 of these clones contained known sequences, 213 contained ESTs, and 105 contained novel sequences. An examination of the known sequences revealed that many of the genes are involved in cellular metabolism.

[0427] An example of an experiment to identify differentially expressed clones is shown in the Figure, “Differential Expression Analysis”. The inserts from subtracted clones were amplified, electrophoresed, and blotted on to membranes as described above. The gel was hybridized with RSA1 cut DE and MD cDNA probes as described above.

[0428] In the Figure, individual clones are designated by a number at the top of each lane; the blots are aligned so that the same clone is represented in the same vertical lane in both the upper (“Cancer Probe”) and lower (“Normal Probe”) blot. Lanes labeled “O” indicate clones that are overexpressed, i.e., show a darker, more prominent band in the upper blot (“Cancer Probe”) relative to that observed, in the same lane, in the lower blot (“Normal Probe”). The Lane labeled “U” indicates a clone that is underexpressed, i.e., shows a darker, more prominent band in the lower blot (“Normal Probe”) relative to that observed, in the same lane, in the upper blot (“Cancer Probe”). The lane labeled “M”, indicates a clone that is marginally overexpressed in cancer and normal cells.

[0429] B. Results of Public Database searches

[0430] The nucleotide sequence of SEQ ID Nos. 1-850 were aligned with individual sequences that were publicly available. Genbank and divisions of GenBank, such as dbEST, CGAP, and Unigene were the primary databases used to perform the sequence similarity searches. The patent database, GENESEQ, was also utilized.

[0431] A total of 850 sequences were analyzed; most sequences were between 200 and 700 nucleotides in length. The sequences were first masked to identify vector-derived sequences, which were subsequently removed. The remaining sequence information was used to create the sequences listed in the Sequence Listing (SEQ ID Nos. 1-850). Each of these sequences was used as the query sequence to perform a Blast 2 search against the databases listed above. The Blast 2 search differs from the traditional Blast search in that it allows for the introduction of gaps in order to produce an optimal alignment of two sequences.

[0432] A proprietary algorithm was developed to utilize the output from the Blast 2 searches and categorize the sequences based upon high similarity (e value <1e40) or identity to entries contained in the GenBank and dbEST databases. Three categories were created as follows: 1) matches to known human genes, 2) matches to human EST sequences, and 3) no significant match to either 1 or 2, and therefore a potentially novel human sequence.

[0433] Those skilled in the art will recognize, or be able to ascertain, using not more than routine experimentation, many equivalents to the specific embodiments of the invention described herein. Such specific embodiments and equivalents are intended to be encompassed by the following claims.

[0434] All patents, published patent applications, and publications cited herein are incorporated by reference as if set forth fully herein.

TABLE 1

| | | Cell line | Cancer Tissue |
|---|---|---|---|
| SEQ ID NO | clone name | probe | Probes |
| 1 | SW0006 | O | O |
| 2 | SW0019M13 | O | O |
| 3 | SW0025T7 | O | O |
| 4 | SW0026T7 | O | O |
| 5 | SW0044 | O | O |
| 6 | SW007I | O | O |
| 7 | SW008117 | O | O |
| 8 | SW0106 | O | O |
| 9 | SW0116 | O | O |
| 10 | SW0124 | O | O |
| 11 | SW0142M13 | O | O |
| 12 | SW0142T7 | O | O |
| 13 | SW0162T7 | M | N |
| 14 | SW0181T7 | 0 | 0 |
| 15 | SW0184 | M | O |
| 16 | SW0208T7 | O | O |
| 17 | SW0212M13 | O | O |
| 18 | SW0212T7 | O | O |
| 19 | SW0249 | M | O |
| 20 | SW0277 | O | O |
| 21 | SW0292 | O | O |
| 22 | SW0305T7 | M | O |
| 23 | SW0306 | O | O |
| 24 | SW0328 | M | O |
| 25 | SW0337 | O | O |
| 26 | SW0345 | O | O |
| 27 | SW0348 | M | O |
| 28 | SW0353 | O | O |
| 29 | SW0389T7 | O | O |
| 30 | SW0392T7 | M | O |
| 31 | SW0402T7 | O | O |
| 32 | SW0410T7 | M | O |
| 33 | SW0411T7 | M | M |
| 34 | SW0433 | O | O |
| 35 | SW0445T7 | O | O |
| 36 | SW0450T7 | O | M |
| 37 | SW0464 | O | O |
| 38 | SW0466 | M | O |
| 39 | SW0469T7 | M | O |
| 40 | SW0489T7 | O | O |
| 41 | SW0498 | O | O |
| 42 | SW0511M13 | O | O |
| 43 | SW0511T7 | O | O |
| 44 | SW0519T7 | O | M |
| 45 | SW0522 | O | O |
| 46 | SW0539 | O | O |
| 47 | SW0558 | O | O |
| 48 | SW0585T7 | O | O |
| 49 | SW0602T7 | O | O |
| 50 | SW0605T7 | O | O |
| 51 | SW0638M13 | O | O |
| 52 | SW0638T7 | O | O |
| 53 | SW0652T7 | O | O |
| 54 | SW0659 | O | O |
| 55 | SW0663T7 | M | O |
| 56 | SW0678T7 | O | O |
| 57 | SW0682T7 | O | M |
| 58 | SW0684 | O | O |
| 59 | SW0693T7 | M | O |
| 60 | SW0704M13 | O | O |
| 61 | SW0704T7 | O | O |
| 62 | SW0709M13 | O | O |
| 63 | SW0709T7 | O | O |
| 64 | SW0730T7 | O | O |
| 65 | SW0749T7 | O | O |
| 66 | SW0758T7 | M | O |
| 67 | SW0766 | O | O |
| 68 | SW0796M13 | M | O |
| 69 | SW0797T7 | O | O |
| 70 | SW0799T7 | O | O |
| 71 | SW0800T7 | M | O |
| 72 | SW0815T7 | M | O |
| 73 | SW0824M13 | N | O |
| 74 | SW0824T7 | N | O |
| 75 | SW0837 | O | O |
| 76 | SW0843T7 | N | O |
| 77 | SW02852 | M | O |
| 78 | SW0906T7 | O | O |
| 79 | SW0925 | N | O |
| 80 | SW0926T7 | O | O |
| 81 | SW0931T7 | M | O |
| 82 | SW0932 | M | O |
| 83 | SW0961T7 | O | N |
| 84 | SW0962 | O | O |
| 85 | SW0971 | O | O |
| 86 | SW0973T7 | M | M |
| 87 | SW0985 | O | O |
| 88 | SW1000M13 | O | O |
| 89 | SW1000T7 | O | O |
| 90 | SW1015T7 | O | O |
| 91 | SW1032T7 | O | O |
| 92 | SW1051 | O | O |
| 93 | SW1052 | O | O |
| 94 | SW1053 | O | O |
| 95 | SW1059T7 | O | O |
| 96 | SW1067 | M | O |
| 97 | SW1068M13 | O | O |
| 98 | SW1068T7 | O | O |
| 99 | SW1085T7 | M | O |
| 100 | SW1086M13 | M | O |
| 101 | SW1086T7 | M | O |
| 102 | SW1088M13 | O | O |
| 103 | SW1088T7 | O | O |
| 104 | SW1089M13 | O | O |
| 105 | SW1089T7 | O | O |
| 106 | SW109317 | O | O |
| 107 | SW1098 | O | O |
| 108 | SW1115 | O | O |
| 109 | SW1116M13 | O | O |
| 110 | SW1116T7 | O | O |
| 111 | SW1122 | O | O |
| 112 | SW1138M13 | O | O |
| 113 | SW1138T7 | O | O |
| 114 | SW1139M13 | O | O |
| 115 | SW1139T7 | O | O |
| 116 | SW1144M13 | O | O |
| 117 | SW1144T7 | O | O |
| 118 | SW1145M13 | M | O |
| 119 | SW1187T7 | O | O |
| 120 | SW1195M13 | M | O |
| 121 | SW1195T7 | M | O |
| 122 | SW1209T7 | M | N |
| 123 | SW1225M13 | O | O |
| 124 | SW1225T7 | O | O |
| 125 | SW1227M13 | M | O |
| 126 | SW1227T7 | M | O |
| 127 | SW1242 | M | O |
| 128 | SW0004M13 | O | O |
| 129 | SW0004T7 | O | O |
| 130 | SWOO11M13 | O | O |
| 131 | SW0011T7 | O | O |
| 132 | SW0015T7 | O | O |
| 133 | SW0024T7 | M | O |
| 134 | SW0026M13 | O | O |
| 135 | SW0026T7 | O | O |
| 136 | SW0033T7 | O | O |
| 137 | SW0038T7 | M | O |
| 138 | SW0069T7 | O | O |
| 139 | SW0073T7 | O | O |
| 140 | SW0076T7 | O | O |
| 141 | SW0078T7 | O | O |
| 142 | SW0082T7 | O | O |
| 143 | SW0091T7 | O | O |
| 144 | SW0093T7 | O | O |
| 145 | SW0101M13 | O | O |
| 146 | SW0101T7 | O | O |
| 147 | SW0102T7 | O | O |
| 148 | SW0105T7 | O | O |
| 149 | SW0108T7 | O | M |
| 150 | SW0111T7 | O | O |
| 151 | SW0112T7 | O | O |
| 152 | SW0117T7 | O | O |
| 153 | SW0119T7 | O | O |
| 154 | SW0122T7 | M | O |
| 155 | SW0131T7 | O | O |
| 156 | SW0132T7 | O | O |
| 157 | SW0144T7 | M | O |
| 158 | SW0146T7 | M | O |
| 159 | SW0156T7 | O | O |
| 160 | SW0160T7 | O | O |
| 161 | SW0163T7 | O | O |
| 162 | SW0166T7 | O | O |
| 163 | SW0175T7 | M | O |
| 164 | SW0177M13 | O | O |
| 165 | SW0182T7 | O | O |
| 166 | SW0185T7 | O | O |
| 167 | SW0189T7 | O | O |
| 168 | SW0191T7 | O | O |
| 169 | SW0195T7 | O | O |
| 170 | SW0202T7 | O | O |
| 171 | SW0203T7 | O | O |
| 172 | SW0213T7 | O | N |
| 173 | SW0224T7 | O | O |
| 174 | SW0229T7 | O | O |
| 175 | SW0231M13 | O | O |
| 176 | SW0241T7 | O | O |
| 177 | SW0242T7 | O | O |
| 178 | SW0246T7 | O | O |
| 179 | SW0248T7 | O | O |
| 180 | SW0254T7 | O | O |
| 181 | SW0260T7 | M | M |
| 182 | SW0264T7 | O | O |
| 183 | SW0267T7 | M | O |
| 184 | SW0269T7 | O | O |
| 185 | SW0271T7 | O | O |
| 186 | SW0273T7 | O | O |
| 187 | SW0280T7 | O | O |
| 188 | SW0281T7 | O | O |
| 189 | SW0291T7 | O | O |
| 190 | SW0294T7 | O | O |
| 191 | SW0295T7 | O | O |
| 192 | SW0296T7 | O | O |
| 193 | SW0297T7 | O | O |
| 194 | SW0301T7 | O | O |
| 195 | SW0310T7 | O | O |
| 196 | SW0311M13 | O | O |
| 197 | SW0325T7 | O | O |
| 198 | SW0326T7 | O | O |
| 199 | SW0330T7 | M | O |
| 200 | SW0334T7 | O | N |
| 201 | SW0339T7 | O | O |
| 202 | SW0341T7 | O | O |
| 203 | SW0358T7 | O | O |
| 204 | SW0359T7 | M | O |
| 205 | SW0360T7 | O | O |
| 206 | SW0361M13 | O | O |
| 207 | SW0367T7 | O | O |
| 208 | SW0369T7 | O | O |
| 209 | SW0394T7 | O | O |
| 210 | SW0399T7 | O | O |
| 211 | SW0401T7 | O | O |
| 212 | SW0403T7 | O | O |
| 213 | SW0412T7 | M | O |
| 214 | SW0419T7 | O | O |
| 215 | SW0429T7 | M | M |
| 216 | SW0434T7 | O | O |
| 217 | SW0441T7 | O | O |
| 218 | SW0446T7 | O | O |
| 219 | SW0454T7 | O | O |
| 220 | SW0461T7 | O | O |
| 221 | SW0468T7 | O | O |
| 222 | SW0484T7 | O | U |
| 223 | SW0489M13 | O | U |
| 224 | SW0496T7 | O | U |
| 225 | SW0499T7 | O | O |
| 226 | SW0507T7 | O | M |
| 227 | SW0514T7 | O | M |
| 228 | SW0520T7 | O | M |
| 229 | SW0531T7 | M | N |
| 230 | SW0537T7 | M | N |
| 231 | SW0548T7 | O | U |
| 232 | SW0555T7 | O | N |
| 233 | SW0557T7 | O | N |
| 234 | SW0560T7 | O | N |
| 235 | SW0563T7 | O | U |
| 236 | SW0570T7 | O | O |
| 237 | SW0572T7 | O | M |
| 238 | SW0573T7 | M | U |
| 239 | SW0574T7 | O | O |
| 240 | SW0575T7 | O | O |
| 241 | SW0577T7 | O | O |
| 242 | SW0583T7 | O | O |
| 243 | SW0604T7 | O | O |
| 244 | SW0605M13 | O | O |
| 245 | SW0609T7 | M | O |
| 246 | SW0610M13 | M | O |
| 247 | SW0610T7 | M | O |
| 248 | SW0613T7 | O | M |
| 249 | SW0621T7 | O | O |
| 250 | SW0633T7 | O | O |
| 251 | SW0647T7 | O | O |
| 252 | SW0654M13 | M | O |
| 253 | SW0658T7 | M | O |
| 254 | SW0662T7 | O | O |
| 255 | SW0663M13 | M | O |
| 256 | SW066817 | O | O |
| 257 | SW0672T7 | O | O |
| 258 | SW0674T7 | O | N |
| 259 | SW0676T7 | O | M |
| 260 | SW0677T7 | O | O |
| 261 | SW0678M13 | O | O |
| 262 | SW0681T7 | O | M |
| 263 | SW0683T7 | O | M |
| 264 | SW0687T7 | O | M |
| 265 | SW0688T7 | O | O |
| 266 | SW0692T7 | O | N |
| 267 | SW0694T7 | O | O |
| 268 | SW0697T7 | O | O |
| 269 | SW0710T7 | O | O |
| 270 | SW0711T7 | O | O |
| 271 | SW0713T7 | N | M |
| 272 | SW0724T7 | M | U |
| 273 | SW0734T7 | M | O |
| 274 | SW0736T7 | N | M |
| 275 | SW074417 | O | O |
| 276 | SW0751T7 | O | O |
| 277 | SW0753T7 | O | O |
| 278 | SW0763T7 | O | O |
| 279 | SW0768T7 | M | M |
| 280 | SW0770T7 | O | M |
| 281 | SW0772T7 | O | N |
| 282 | SW0774T7 | M | O |
| 283 | SW0778T7 | M | M |
| 284 | SW0779T7 | M | M |
| 285 | SW0783T7 | O | O |
| 286 | SW0784T7 | O | M |
| 287 | SW0786T7 | N | O |
| 288 | SW0787T7 | O | N |
| 289 | SW0797M13 | O | O |
| 290 | SW0803T7 | O | O |
| 291 | SW0809T7 | O | N |
| 292 | SW0811T7 | M | N |
| 293 | SW0815M13 | M | O |
| 294 | SW0821T7 | O | O |
| 295 | SW0825T7 | M | M |
| 296 | SW0826T7 | M | M |
| 297 | SW0827M13 | O | O |
| 298 | SW082817 | O | M |
| 299 | SW0836T7 | M | O |
| 300 | SW0839T7 | O | M |
| 301 | SW0843M13 | N | O |
| 302 | SW0846M13 | O | M |
| 303 | SW0847T7 | O | M |
| 304 | SW0849T7 | M | M |
| 305 | SW0850T7 | O | O |
| 306 | SW0855T7 | O | O |
| 307 | SW0863T7 | M | M |
| 308 | SW0866T7 | O | O |
| 309 | SW0867T7 | N | O |
| 310 | SW0896M13 | N | O |
| 311 | SW0912T7 | O | O |
| 312 | SW0914T7 | O | O |
| 313 | SW0916T7 | O | O |
| 314 | SW0918T7 | O | O |
| 315 | SW0921T7 | N | O |
| 316 | SW0923T7 | O | O |
| 317 | SW0926M13 | O | O |
| 318 | SW0928T7 | N | M |
| 319 | SW0947T7 | O | O |
| 320 | SW0949T7 | O | O |
| 321 | SW0954T7 | M | O |
| 322 | SW0964T7 | M | N |
| 323 | SW0969T7 | M | N |
| 324 | SW0972T7 | M | N |
| 325 | SW0982T7 | O | M |
| 326 | SW0994T7 | O | N |
| 327 | SW0998T7 | O | N |
| 328 | SW1001T7 | O | O |
| 329 | SW1002T7 | O | N |
| 330 | SW1012T7 | O | O |
| 331 | SW1018T7 | O | M |
| 332 | SW1045T7 | O | M |
| 333 | SW1046T7 | M | O |
| 334 | SW1058T7 | O | O |
| 335 | SW1059M13 | O | O |
| 336 | SW1061T7 | O | O |
| 337 | SW1064T7 | O | O |
| 338 | SW1065T7 | O | O |
| 339 | SW1080T7 | M | M |
| 340 | SW1085M13 | M | O |
| 341 | SW1087T7 | O | O |
| 342 | SW1091T7 | O | O |
| 343 | SW1093M13 | O | O |
| 344 | SW1097T7 | O | O |
| 345 | SW11O4T7 | O | O |
| 346 | SW1105T7 | O | O |
| 347 | SW1106T7 | O | O |
| 348 | SW1107T7 | O | O |
| 349 | SW1108T7 | O | O |
| 350 | SW1109T7 | O | O |
| 351 | SW1114T7 | O | O |
| 352 | SW1123T7 | O | O |
| 353 | SW1124T7 | O | O |
| 354 | SW1130T7 | M | O |
| 355 | SW1131T7 | M | O |
| 356 | SW1132T7 | M | O |
| 357 | SW1133M13 | M | O |
| 358 | SW1134T7 | O | O |
| 359 | SW1136T7 | O | N |
| 360 | SW1141T7 | M | O |
| 361 | SW1146T7 | M | O |
| 362 | SW1147T7 | O | O |
| 363 | SW1155T7 | O | N |
| 364 | SW1156T7 | O | N |
| 365 | SW1160T7 | O | N |
| 366 | SW1161T7 | O | N |
| 367 | SW1169T7 | O | N |
| 368 | SW1176T7 | O | O |
| 369 | SW1182T7 | O | O |
| 370 | SW1193T7 | O | O |
| 371 | SW1201T7 | O | O |
| 372 | SW1203T7 | O | O |
| 373 | SW1212T7 | O | M |
| 374 | SW1213M13 | O | M |
| 375 | SW1214T7 | O | N |
| 376 | SW1218T7 | O | N |
| 377 | SW1220T7 | O | N |
| 378 | SW1232T7 | O | N |
| 379 | SW1236M13 | O | N |
| 380 | SW1238T7 | O | O |
| 381 | SW1239T7 | O | O |
| 382 | SW1245M13 | M | N |
| 383 | SW1247T7 | O | O |
| 384 | SW0003T7 | O | O |
| 385 | SW0009T7 | O | O |
| 386 | SW0012T7 | O | O |
| 387 | SW0013T7 | O | O |
| 388 | SW0015T7 | O | O |
| 389 | SW0016T7 | U | N |
| 390 | SW0018T7 | O | O |
| 391 | SW0019T7 | O | O |
| 392 | SW0023T7 | O | O |
| 393 | SW0025T7 | O | O |
| 394 | SW0027T7 | O | O |
| 395 | SW0029M13 | O | O |
| 396 | SW0030T7 | O | O |
| 397 | SW0039T7 | O | O |
| 398 | SW0043T7 | O | O |
| 399 | SW0046T7 | O | O |
| 400 | SW0048T7 | O | O |
| 401 | SW0050T7 | O | O |
| 402 | SW0052T7 | O | O |
| 403 | SW0063T7 | O | O |
| 404 | SW0064T7 | O | O |
| 405 | SW0068T7 | O | N |
| 406 | SW0072T7 | O | O |
| 407 | SW0074T7 | O | N |
| 408 | SW0075T7 | O | O |
| 409 | SW0077T7 | O | O |
| 410 | SW0080T7 | O | O |
| 411 | SW0081T7 | O | O |
| 412 | SW0085T7 | O | O |
| 413 | SW0088T7 | O | O |
| 414 | SW0090T7 | O | O |
| 415 | SW0095T7 | O | O |
| 416 | SW0103T7 | M | O |
| 417 | SW0104T7 | M | O |
| 418 | SW0121T7 | O | N |
| 419 | SW0123T7 | O | O |
| 420 | SW0125T7 | O | O |
| 421 | SW0127T7 | O | O |
| 422 | SW0128T7 | O | O |
| 423 | SW0129T7 | O | O |
| 424 | SW0130T7 | O | N |
| 425 | SW0133T7 | M | M |
| 426 | SW0134T7 | O | O |
| 427 | SW0135T7 | M | O |
| 428 | SW0140T7 | O | O |
| 429 | SW0141T7 | M | O |
| 430 | SW0143T7 | O | O |
| 431 | SW0145T7 | O | O |
| 432 | SW0147T7 | O | O |
| 433 | SW0152T7 | O | O |
| 434 | SW0155T7 | O | N |
| 435 | SW0157T7 | O | O |
| 436 | SW0158T7 | O | O |
| 437 | SW0159T7 | O | O |
| 438 | SW0169T7 | O | O |
| 439 | SW0170T7 | O | O |
| 440 | SW0171T7 | O | O |
| 441 | SW0173T7 | O | O |
| 442 | SW0178T7 | O | O |
| 443 | SW0179T7 | O | O |
| 444 | SW0180T7 | O | O |
| 445 | SW0183T7 | O | N |
| 446 | SW0186T7 | M | M |
| 447 | SW0187T7 | M | U |
| 448 | SW0188T7 | O | O |
| 449 | SW0190T7 | O | O |
| 450 | SW0192T7 | O | O |
| 451 | SW0196T7 | O | O |
| 452 | SW0199T7 | O | O |
| 453 | SW0201T7 | O | M |
| 454 | SW0204T7 | O | M |
| 455 | SW0205T7 | O | N |
| 456 | SW0206T7 | O | O |
| 457 | SW0207T7 | O | M |
| 458 | SW0210T7 | O | O |
| 459 | SW0211T7 | O | O |
| 460 | SW0214T7 | O | O |
| 461 | SW0217T7 | O | O |
| 462 | SW0218T7 | O | O |
| 463 | SW0220T7 | O | O |
| 464 | SW0223T7 | O | O |
| 465 | SW0229T7 | O | O |
| 466 | SW0237T7 | O | O |
| 467 | SW0244T7 | O | O |
| 468 | SW0247T7 | O | O |
| 469 | SW0250T7 | O | O |
| 470 | SW0251T7 | O | O |
| 471 | SW0252T7 | O | O |
| 472 | SW0253T7 | O | O |
| 473 | SW0255T7 | O | O |
| 474 | SW0256T7 | O | O |
| 475 | SW0257T7 | O | O |
| 476 | SW0258T7 | O | O |
| 477 | SW0262T7 | O | O |
| 478 | SW0275T7 | O | O |
| 479 | SW0278T7 | M | O |
| 480 | SW0285T7 | O | O |
| 481 | SW0289T7 | O | M |
| 482 | SW0290T7 | O | O |
| 483 | SW0293T7 | O | O |
| 484 | SW0300T7 | O | O |
| 485 | SW0302T7 | O | O |
| 486 | SW0303T7 | O | O |
| 487 | SW0307T7 | O | O |
| 488 | SW0308T7 | O | O |
| 489 | SW0311T7 | O | O |
| 490 | SW0312T7 | O | O |
| 491 | SW0313T7 | O | O |
| 492 | SW0314T7 | O | O |
| 493 | SW0319T7 | O | O |
| 494 | SW0322T7 | O | N |
| 495 | SW0333T7 | O | O |
| 496 | SW0338T7 | M | O |
| 497 | SW0340TT | O | O |
| 498 | SW0342T7 | O | O |
| 499 | SW0344T7 | O | O |
| 500 | SW0346T7 | O | O |
| 501 | SW0347T7 | O | O |
| 502 | SW0349T7 | M | O |
| 503 | SW0350T7 | O | O |
| 504 | SW0351T7 | O | O |
| 505 | SW0352T7 | O | O |
| 506 | SW0354T7 | O | O |
| 507 | SW0355T7 | O | O |
| 508 | SW0356T7 | O | M |
| 509 | SW0357T7 | O | O |
| 510 | SW0361T7 | O | O |
| 511 | SW0362T7 | O | O |
| 512 | SW0365T7 | O | O |
| 513 | SW0366T7 | O | O |
| 514 | SW0381T7 | O | O |
| 515 | SW0391M13 | O | O |
| 516 | SW0393T7 | O | O |
| 517 | SW0395T7 | O | M |
| 518 | SW0396T7 | M | O |
| 519 | SW0398T7 | O | O |
| 520 | SW0400T7 | O | O |
| 521 | SW0404T7 | O | O |
| 522 | SW0405T7 | O | O |
| 523 | SW0406T7 | M | O |
| 524 | SW0407T7 | O | O |
| 525 | SW0408T7 | M | O |
| 526 | SW0413T7 | M | O |
| 527 | SW0414T7 | O | U |
| 528 | SW0415T7 | O | O |
| 529 | SW0417T7 | N | O |
| 530 | SW0418T7 | O | O |
| 531 | SW0426T7 | O | O |
| 532 | SW0427T7 | O | O |
| 533 | SW0428T7 | M | U |
| 534 | SW0430T7 | M | O |
| 535 | SW0435T7 | O | O |
| 536 | SW0436T7 | O | O |
| 537 | SW0438T7 | O | O |
| 538 | SW0439M13 | O | O |
| 539 | SW0440T7 | O | O |
| 540 | SW0442M13 | O | N |
| 541 | SW0443T7 | O | O |
| 542 | SW0444T7 | O | O |
| 543 | SW0448T7 | O | M |
| 544 | SW0452M13 | O | O |
| 545 | SW0455T7 | O | O |
| 546 | SW0456T7 | O | O |
| 547 | SW0457T7 | O | O |
| 548 | SW0458T7 | O | O |
| 549 | SW0459T7 | O | O |
| 550 | SW0460T7 | M | M |
| 551 | SW0463T7 | O | O |
| 552 | SW0467M13 | O | O |
| 553 | SW0469M13 | M | O |
| 554 | SW0473M13 | O | M |
| 555 | SW0474T7 | O | O |
| 556 | SW0476T7 | O | O |
| 557 | SW0481T7 | O | U |
| 558 | SW0485T7 | O | U |
| 559 | SW0486T7 | O | U |
| 560 | SW0487T7 | O | U |
| 561 | SW0488T7 | O | O |
| 562 | SW0490T7 | U | U |
| 563 | SW0491T7 | O | U |
| 564 | SW0492T7 | O | U |
| 565 | SW0494T7 | O | U |
| 566 | SW0495T7 | O | O |
| 567 | SW0497T7 | O | N |
| 568 | SW0500T7 | O | U |
| 569 | SW0501T7 | N or U | U |
| 570 | SW0502T7 | M | N |
| 571 | SW0503T7 | O | U |
| 572 | SW0504T7 | O | N |
| 573 | SW0505T7 | N | N |
| 574 | SW0506T7 | O | U |
| 575 | SW0509T7 | O | M |
| 576 | SW0512T7 | O | U |
| 577 | SW0513T7 | O | U |
| 578 | SW0515T7 | O | O |
| 579 | SW0516T7 | O | M |
| 580 | SW0517T7 | O | M |
| 581 | SW0518T7 | O | N |
| 582 | SW0525T7 | M | N |
| 583 | SW0529T7 | O | N |
| 584 | SW0532T7 | O | N |
| 585 | SW0533T7 | O | N |
| 586 | SW0534T7 | O | M |
| 587 | SW0535T7 | O | O |
| 588 | SW0536T7 | M | U |
| 589 | SW0538T7 | O | N |
| 590 | SW0540T7 | O | O |
| 591 | SW0541T7 | O | O |
| 592 | SW0542T7 | O | O |
| 593 | SW0543T7 | O | O |
| 594 | SW0544M13 | O | M |
| 595 | SW0545T7 | O | O |
| 596 | SW0546T7 | O | O |
| 597 | SW0547T7 | O | U |
| 598 | SW0550T7 | O | M |
| 599 | SW0551T7 | O | M |
| 600 | SW0552T7 | O | U |
| 601 | SW0554T7 | O | U |
| 602 | SW0559T7 | O | M |
| 603 | SW0561T7 | O | N |
| 604 | SW0562T7 | O | U |
| 605 | SW0566T7 | O | O |
| 606 | SW0567T7 | O | N |
| 607 | SW0568T7 | O | N |
| 608 | SW0569T7 | O | O |
| 609 | SWO571T7 | O | O |
| 610 | SW0578T7 | O | N |
| 611 | SW0580T7 | O | O |
| 612 | SW0582T7 | O | O |
| 613 | SW0584T7 | O | O |
| 614 | SW0591T7 | N | O |
| 615 | SW0606T7 | O | O |
| 616 | SW0607T7 | O | O |
| 617 | SW0608T7 | O | O |
| 618 | SW0611T7 | O | O |
| 619 | SW0612T7 | N | O |
| 620 | SW0616T7 | O | M |
| 621 | SW0623T7 | O | O |
| 622 | SW0629T7 | O | O |
| 623 | SW0635T7 | O | O |
| 624 | SW0636T7 | O | O |
| 625 | SW0637T7 | O | M |
| 626 | SW0640T7 | N | O |
| 627 | SW0641T7 | O | M |
| 628 | SW0642T7 | O | O |
| 629 | SW0644T7 | O | O |
| 630 | SW0645T7 | O | O |
| 631 | SW0646T7 | O | O |
| 632 | SW0651T7 | O | N |
| 633 | SW0653T7 | M | O |
| 634 | SW0655T7 | O | O |
| 635 | SW0656T7 | O | O |
| 636 | SW0664T7 | M | O |
| 637 | SW0666T7 | O | O |
| 638 | SW0667T7 | O | U |
| 639 | SW0671T7 | O | O |
| 640 | SW0673T7 | O | M |
| 641 | SW0675T7 | O | O |
| 642 | SW0686T7 | O | O |
| 643 | SW0689T7 | O | O |
| 644 | SW0693M13 | M | O |
| 645 | SW0695T7 | O | M |
| 646 | SW0698T7 | M | M |
| 647 | SW0701T7 | O | O |
| 648 | SW0708T7 | O | M |
| 649 | SW0714T7 | O | O |
| 650 | SW0715T7 | O | N |
| 651 | SW0716T7 | O | M |
| 652 | SW0720T7 | O | O |
| 653 | SW0722T7 | O | N |
| 654 | SW0723T7 | O | O |
| 655 | SW0725T7 | O | M |
| 656 | SW0726T7 | O | O |
| 657 | SW0727T7 | M | U |
| 658 | SW0728T7 | O | U |
| 659 | SW0729T7 | O | O |
| 660 | SW0730M13 | O | M |
| 661 | SW0731T7 | O | O |
| 662 | SW0732T7 | O | N |
| 663 | SW0733T7 | O | O |
| 664 | SW0735T7 | O | O |
| 665 | SW0738T7 | O | O |
| 666 | SW0740T7 | O | N |
| 667 | SW0750T7 | O | O |
| 668 | SW0752T7 | O | O |
| 669 | SW0755T7 | O | O |
| 670 | SW0756T7 | O | N |
| 671 | SW0757T7 | O | O |
| 672 | SW0761T7 | O | N |
| 673 | SW0762T7 | O | O |
| 674 | SW0764T7 | M | O |
| 675 | SW0765T7 | O | O |
| 676 | SW0767T7 | M | O |
| 677 | SW0769T7 | M | M |
| 678 | SW0771T7 | O | M |
| 679 | SW0775T7 | M | M |
| 680 | SW0776T7 | O | O |
| 681 | SW0780T7 | O | O |
| 682 | SW0782T7 | M | M |
| 683 | SW0785T7 | O | O |
| 684 | SW0789T7 | O | O |
| 685 | SW0790T7 | O | N |
| 686 | SW0795T7 | O | O |
| 687 | SW0796T7 | M | M |
| 688 | SW0798T7 | M | M |
| 689 | SW0799M13 | O | O |
| 690 | SW0801T7 | O | O |
| 691 | SW0802T7 | M | M |
| 692 | SW0804T7 | O | O |
| 693 | SW0806T7 | O | M |
| 694 | SW0807T7 | N | N |
| 695 | SW0810T7 | M | O |
| 696 | SW0814T7 | O | O |
| 697 | SW0816T7 | N | N |
| 698 | SW0819T7 | O | O |
| 699 | SW0822T7 | O | M |
| 700 | SW0827T7 | O | O |
| 701 | SW0829T7 | O | M |
| 702 | SW0830T7 | O | M |
| 703 | SW0831T7 | O | O |
| 704 | SW0834T7 | O | O |
| 705 | SW0835T7 | O | N |
| 706 | SW0838T7 | O | U |
| 707 | SW0840T7 | O | O |
| 708 | SW0842T7 | O | O |
| 709 | SW0845T7 | O | O |
| 710 | SW0846T7 | O | M |
| 711 | SW0848T7 | O | M |
| 712 | SW0851T7 | M | M |
| 713 | SW0853T7 | O | O |
| 714 | SW0854T7 | N | O |
| 715 | SW0857T7 | O | O |
| 716 | SW0858T7 | M | N |
| 717 | SW0859T7 | M | M |
| 718 | SW0860T7 | O | M |
| 719 | SW0862T7 | M | M |
| 720 | SW0865T7 | N | O |
| 721 | SW0868T7 | O | O |
| 722 | SW0891T7 | O | O |
| 723 | SW0897T7 | O | O |
| 724 | SW0898T7 | O | O |
| 725 | SW0901T7 | O | O |
| 726 | SW0904T7 | O | O |
| 727 | SW0905T7 | N | O |
| 728 | SW0917T7 | O | O |
| 729 | SW0919T7 | O | O |
| 730 | SW0920T7 | O | O |
| 731 | SW0922T7 | O | O |
| 732 | SW0929T7 | O | O |
| 733 | SW0930T7 | O | O |
| 734 | SW0933T7 | M | O |
| 735 | SW0936T7 | M | O |
| 736 | SW0937T7 | O | O |
| 737 | SW0938T7 | N | O |
| 738 | SW0940T7 | O | O |
| 739 | SW0943T7 | O | O |
| 740 | SW0945T7 | O | O |
| 741 | SW0946T7 | N | O |
| 742 | SW0951T7 | O | O |
| 743 | SW0952T7 | O | O |
| 744 | SW0953T7 | O | O |
| 745 | SW0955T7 | N | O |
| 746 | SW0957T7 | O | O |
| 747 | SW0967T7 | O | M |
| 748 | SW0968T7 | O | O |
| 749 | SW0970T7 | O | N |
| 750 | SW0974T7 | O | O |
| 751 | SW0975T7 | O | O |
| 752 | SW0976T7 | O | O |
| 753 | SW0977T7 | M | N |
| 754 | SW0978T7 | O | N |
| 755 | SW0983T7 | O | M |
| 756 | SW0988T7 | O | N |
| 757 | SW0989T7 | M | O |
| 758 | SW099OT7 | M | N |
| 759 | SW0991T7 | O | N |
| 760 | SW0992T7 | O | O |
| 761 | SW0997T7 | M | N |
| 762 | SW1004T7 | O | O |
| 763 | SW1007T7 | M | N |
| 764 | SW1008T7 | O | O |
| 765 | SW1024T7 | O | M |
| 766 | SW1027T7 | O | O |
| 767 | SW1028T7 | O | O |
| 768 | SW1029T7 | O | M |
| 769 | SW1030T7 | M | O |
| 770 | SW1032M13 | O | O |
| 771 | SW1036T7 | O | N |
| 772 | SW1037T7 | O | N |
| 773 | SW1039T7 | O | N |
| 774 | SW1047T7 | M | N |
| 775 | SW1048T7 | O | O |
| 776 | SW1050T7 | O | O |
| 777 | SW1055T7 | O | N |
| 778 | SW1062T7 | O | O |
| 779 | SW1063T7 | O | O |
| 780 | SW1066T7 | O | O |
| 781 | SW1069T7 | O | O |
| 782 | SW1070T7 | M | O |
| 783 | SW1074T7 | O | O |
| 784 | SW1075T7 | O | O |
| 785 | SW1076T7 | O | O |
| 786 | SW1077T7 | O | O |
| 787 | SW1078T7 | O | O |
| 788 | SW1081T7 | O | O |
| 789 | SW1082T7 | O | O |
| 790 | SW1094T7 | O | O |
| 791 | SW1095T7 | O | N |
| 792 | SW1096T7 | O | O |
| 793 | SW1099T7 | O | O |
| 794 | SW1101T7 | O | O |
| 795 | SW1103T7 | O | O |
| 796 | SW1111T7 | O | O |
| 797 | SW1112T7 | O | O |
| 798 | SW1113T7 | O | O |
| 799 | SW1117T7 | O | O |
| 800 | SW1118T7 | O | O |
| 801 | SW1119T7 | O | O |
| 802 | SW1121T7 | O | N |
| 803 | SW1125T7 | O | O |
| 804 | SW1128T7 | M | N |
| 805 | SW1129T7 | O | O |
| 806 | SW1140T7 | M | N |
| 807 | SW1143T7 | O | O |
| 808 | SW1145T7 | M | O |
| 809 | SW1149T7 | M | O |
| 810 | SW1153T7 | O | N |
| 811 | SW1157T7 | O | O |
| 812 | SW1158T7 | O | N |
| 813 | SW1164T7 | O | M |
| 814 | SW1165T7 | O | N |
| 815 | SW1166T7 | O | O |
| 816 | SW1167T7 | O | N |
| 817 | SW1170T7 | M | N |
| 818 | SW1171T7 | O | N |
| 819 | SW1172T7 | O | N |
| 820 | SW1173T7 | O | N |
| 821 | SW1175T7 | O | N |
| 822 | SW1178T7 | O | O |
| 823 | SW1179T7 | O | O |
| 824 | SW1180T7 | M | N |
| 825 | SW1183T7 | O | M |
| 826 | SW1187M13 | O | N |
| 827 | SW1189T7 | O | N |
| 828 | SW1192T7 | O | N |
| 829 | SW1196T7 | M | N |
| 830 | SW1199T7 | M | O |
| 831 | SW1200T7 | O | M |
| 832 | SW1202T7 | O | N |
| 833 | SW1204T7 | O | N |
| 834 | SW1205T7 | O | N |
| 835 | SW1207T7 | O | N |
| 836 | SW1210T7 | M | N |
| 837 | SW1213T7 | O | M |
| 838 | SW1221T7 | O | N |
| 839 | SW1223T7 | O | O |
| 840 | SW1224T7 | O | N |
| 841 | SW1228T7 | O | O |
| 842 | SW1230T7 | O | N |
| 843 | SW1231T7 | O | O |
| 844 | SW1234T7 | O | O |
| 845 | SW1235T7 | O | N |
| 846 | SW1237T7 | O | N |
| 847 | SW1240T7 | O | O |
| 848 | SW1241T7 | O | O |
| 849 | SW1243T7 | O | O |
| 850 | SW1246T7 | O | N |

[0435] TABLE 2

| | | “Novel” Region 1 | “Novel” Region 2 | | | | | |
|---|---|---|---|---|---|---|---|---|
| SEQ ID NO | Clone name | Start/Stop | Start/Stop | GenBank Identifier for top 5 matching EST sequences | | | | |
| 128 | SW0004M13 | 742-865 | | g1947473 | g1969195 | g2216795 | g1236508 | g1952906 |
| 129 | SW0004T7 | 752-910 | | g1947473 | g1969195 | g2216795 | g1236508 | g2209605 |
| 130 | SW0011M13 | 1-218 | 553-932 | g2241970 | g2140706 | g1720731 | | |
| 131 | SW0011T7 | 1-264 | 599-890 | g2241970 | g2140706 | g1720731 | | |
| 132 | SW0015T7 | 483-606 | | g675241 | g900355 | g706376 | g1774265 | g2337538 |
| 133 | SW0024T7 | 1-148 | 268-606 | g4033911 | g1960000 | g679294 | g2180239 | g942639 |
| 134 | SW0026M13 | 400-598 | | g767139 | g880785 | g696474 | g2558187 | g2038504 |
| 135 | SW0026T7 | 1-199 | 285-336 | g767139 | g880785 | g696474 | g2558187 | g1494014 |
| 136 | SW0033T7 | 427-610 | | g2873486 | g1960450 | g4440193 | g2268964 | g1721900 |
| 137 | SW0038T7 | 321-645 | | g4222862 | g2583432 | g3052863 | g2768420 | g3229743 |
| 138 | SW0069T7 | 366-612 | | g770924 | g1308307 | g4741105 | g1844710 | |
| 139 | SW0073T7 | 521-592 | | g1152099 | g2191626 | g1750705 | g2025963 | g1296011 |
| 140 | SW0076T7 | 456-618 | | g2567157 | g2236340 | g2620190 | g3754642 | g2031668 |
| 142 | SW0082T7 | 511-601 | | g1718668 | g1274002 | g2265780 | g3214360 | g1137129 |
| 146 | SW0101T7 | 420-624 | | g1376510 | g708780 | g792817 | g901666 | g390100 |
| 147 | SW0102T7 | 512-599 | | g4223023 | g3430515 | g3900153 | g4125195 | g2931421 |
| 148 | SW0105T7 | 1-219 | 570-609 | g2835475 | g1482129 | g1624179 | g1817372 | g2007732 |
| 149 | SW0108T7 | 220-296 | 552-589 | g2154028 | g1303058 | g1645371 | g1792312 | g2882934 |
| 150 | SW0111T7 | 1-68 | | g1308307 | g4332333 | | | |
| 153 | SW0119T7 | 510-596 | | g4265953 | g2836717 | g4487239 | g3228921 | g2876545 |
| 154 | SW0122T7 | 1-51 | | g1760809 | g3804685 | g2457104 | g661521 | |
| 158 | SW0146T7 | 1-76 | 333-617 | g2009649 | g985491 | g1011403 | g956142 | g961346 |
| 159 | SW0156T7 | 1-71 | 782-1002 | g2902747 | g3887935 | g4223262 | g4684438 | g1162310 |
| 162 | SW0166T7 | 1-48 | 444-638 | g2264624 | g3755582 | g1891049 | g4440147 | g2357138 |
| 163 | SW0175T7 | 1-303 | 829-1002 | g724430 | g2154572 | g1958041 | | |
| 166 | SW0185T7 | 113-208 | | g1647210 | g1647264 | g3886862 | g2444221 | |
| 168 | SW0191T7 | 388-683 | | g829950 | g771211 | g766442 | g2785582 | g1441052 |
| 172 | SW0213T7 | 449-617 | | g3886373 | g955334 | g1940943 | g961389 | g955941 |
| 174 | SW0229T7 | 293-987 | | g2033455 | | | | |
| 176 | SW0241T7 | 494-570 | | g2010030 | g2021290 | g918739 | g893980 | g1976699 |
| 177 | SW0242T7 | 1-41 | 440-621 | g3645529 | g4565156 | g2335995 | g1978587 | g2019409 |
| 178 | SW0246T7 | 1-202 | | g1162850 | g1140707 | g1990341 | g1191239 | g2538237 |
| 179 | SW0248T7 | 497-650 | | g4079044 | g2158663 | g2788869 | g1195625 | g3750745 |
| 182 | SW0264T7 | 1-94 | 479-609 | g1976294 | g3446793 | g2459258 | g1153656 | g2577184 |
| 186 | SW0273T7 | 1-89 | 546-838 | g3677131 | g3805522 | g3244458 | g4525163 | g4598742 |
| 187 | SW0280T7 | 412-628 | | g1815110 | g1933167 | g2817266 | | |
| 188 | SW0281T7 | 109-160 | 572-654 | g2436919 | g2185995 | g3758001 | g654599 | g4523959 |
| 189 | SW0291T7 | 481-650 | | g1992596 | g1138351 | g1146820 | g395782 | g1837320 |
| 190 | SW0294T7 | 431-699 | | g2839339 | g3838466 | g1307860 | g2617794 | g1479221 |
| 196 | SW0311M13 | 1-46 | 456-858 | g4195712 | g4648481 | g2750125 | g796654 | g683242 |
| 197 | SW0325T7 | 511-615 | | g1270394 | g3896108 | g2009344 | g1238973 | g2184702 |
| 198 | SW0326T7 | 499-557 | | g1967113 | g1987684 | g1966134 | g1966828 | g2904744 |
| 200 | SW0334T7 | 525-815 | | g1624696 | g2356793 | g1784223 | g1774696 | g1764577 |
| 202 | SW0341T7 | 414-584 | | g774421 | g570881 | g1623681 | g3040994 | g1481791 |
| 203 | SW0358T7 | 112-188 | 513-608 | g1984379 | g3789679 | g3741829 | g4531886 | g1524800 |
| 204 | SW0359T7 | 57-159 | 561-621 | g1802072 | g1663807 | g1894318 | g1775584 | g1678033 |
| 206 | SW0361M13 | 1-65 | 183-572 | g2030884 | g645753 | g1988795 | g1577434 | g1578203 |
| 207 | SW0367T7 | 559-616 | | g644105 | g716356 | g901097 | g1188705 | g712897 |
| 210 | SW0399T7 | 486-589 | | g1856563 | g1690249 | g1966703 | g1952828 | g1639845 |
| 211 | SW0401T7 | 470-590 | | g1165586 | g1690123 | g1967659 | g1491055 | g918845 |
| 212 | SW0403T7 | 369-614 | | g3214476 | g1648508 | g1802846 | g2703245 | g1686573 |
| 213 | SW0412T7 | 1-304 | 509-624 | g681577 | g712993 | g4305548 | g3428224 | g318414 |
| 214 | SW0419T7 | 134-612 | | g1388511 | g4533033 | g2552190 | g3240798 | g3366974 |
| 215 | SW0429T7 | 516-618 | | g1349681 | g1269881 | g4522374 | g1272714 | g3933264 |
| 216 | SW0434T7 | 349-595 | | g4261346 | g3596444 | g3755357 | g3329909 | g4684571 |
| 217 | SW0441T7 | 428-610 | | g4762076 | g2158733 | g2158750 | g2809783 | g2113084 |
| 218 | SW0446T7 | 458-585 | | g4111486 | g1484542 | g3415988 | g1959348 | g2874960 |
| 219 | SW0454T7 | 116-599 | | g1319069 | g1319055 | g2669407 | g2355953 | g3181853 |
| 220 | SW0461T7 | 1-189 | 411-602 | g1295370 | g2008512 | g1783876 | g1571056 | |
| 221 | SW0468T7 | 1-56 | 477-573 | g2163292 | g2162568 | g4534378 | g1225564 | g1696820 |
| 223 | SW0489M13 | 449-564 | | g1779025 | g2027299 | g1960180 | g2016248 | g2879596 |
| 224 | SW0496T7 | 160-277 | | g1040448 | g1012154 | g1023347 | g713991 | g2102784 |
| 225 | SW0499T7 | 451-589 | | g1745433 | g4535376 | g3933969 | g1202500 | g2036548 |
| 226 | SW0507T7 | 539-636 | | g1694289 | g1959749 | g3075884 | g2819611 | g1959689 |
| 227 | SW0514T7 | 348-451 | | g815990 | g4824527 | g4281629 | g2110723 | g2445651 |
| 228 | SW0520T7 | 1-200 | | g1999728 | g1959807 | g3897416 | g3178305 | g1305759 |
| 231 | SW0548T7 | 511-639 | | g2036727 | g1692039 | g1951783 | g2715495 | g1467798 |
| 234 | SW0560T7 | 237-408 | | g1180638 | g2110980 | g664974 | g1061663 | |
| 237 | SW0572T7 | 1-47 | 530-607 | g2825571 | g4395571 | g896553 | g4686751 | g2209790 |
| 239 | SW0574T7 | 1-53 | | g1721900 | g1962046 | g2268964 | g1516296 | g1317142 |
| 242 | SW0583T7 | 156-284 | 500-565 | g1983062 | g1779675 | g3924063 | g1689139 | |
| 243 | SW0604T7 | 272-647 | | g1151602 | g1799297 | g1406230 | g1799313 | g1522519 |
| 244 | SW0605M13 | 436-603 | | g3255034 | g4523614 | g2322572 | g820653 | g2195650 |
| 245 | SW0609T7 | 553-640 | | g870149 | g870280 | g2064580 | g793188 | g2069435 |
| 246 | SW0610M13 | 263-312 | 545-608 | g1689308 | g1289557 | g1042368 | g1617963 | g758860 |
| 247 | SW0610T7 | 1-81 | 496-632 | g27910 | g873209 | g812805 | g1183490 | g1183486 |
| 248 | SW0613T7 | 274-624 | | g3118093 | g877748 | g781949 | g565336 | g2714808 |
| 249 | SW0621T7 | 295-636 | | g4070350 | g4087920 | g1898671 | g3897398 | g3869687 |
| 250 | SW0633T7 | 478-669 | | g4300499 | g3307939 | g2840238 | g1386618 | g1986484 |
| 251 | SW0647T7 | 530-670 | | g1959511 | g1689297 | g1306866 | g813671 | g1379450 |
| 252 | SW0654M13 | 398-461 | | g1894108 | g838679 | g788785 | g815632 | g1639675 |
| 253 | SW0658T7 | 133-433 | | g2878157 | g3091572 | g3923528 | g3917060 | g4687687 |
| 254 | SW0662T7 | 505-652 | | g4083719 | g2539985 | g3649260 | g3735769 | g2526564 |
| 255 | SW0663M13 | 315-605 | | g2786351 | g645679 | g961061 | g1178347 | g1880239 |
| 256 | SW0668T7 | 371-654 | | g1273871 | g1978052 | g2001412 | g3094537 | g3959666 |
| 257 | SW0672T7 | 477-594 | | g1376487 | g1815330 | g691414 | g3399778 | g3648989 |
| 258 | SW0674T7 | 505-648 | | g1280912 | g774134 | g3849587 | g1516408 | g774915 |
| 260 | SW0677T7 | 1-148 | 432-584 | g1999506 | g1967695 | g2358776 | g1886210 | g1923470 |
| 261 | SW0678M13 | 146-219 | 309-526 | g1502150 | g2027232 | g2013528 | g597973 | g2219539 |
| 262 | SW0681T7 | 1-105 | 422-703 | g2329443 | g3897476 | g4534909 | g2786614 | |
| 263 | SW0683T7 | 301-344 | 410-475 | g1645468 | g1507025 | g3280794 | g865342 | g866161 |
| 264 | SW0687T7 | 276-601 | | g2986269 | g4665361 | g2988563 | g3755365 | g1264045 |
| 265 | SW0688T7 | 404-643 | | g1188074 | g1188536 | g1693906 | g1199366 | g689454 |
| 266 | SW0692T7 | 1-54 | 490-582 | g1969153 | g4534166 | g3990730 | g2215531 | g1927555 |
| 267 | SW0694T7 | 503-585 | | g2184535 | g812780 | g3117755 | g4688064 | g4267188 |
| 268 | SW0697T7 | 279-661 | | g2986269 | g4665361 | g2988563 | g3755365 | g2821651 |
| 269 | SW0710T7 | 476-643 | | g1307580 | g2053081 | g1299364 | g2021058 | g1515716 |
| 270 | SW0711T7 | 540-650 | | g1967859 | g1970279 | g1967270 | g1966441 | g1958872 |
| 271 | SW0713T7 | 478-620 | | g1308937 | g1484655 | g1967497 | g685648 | g1990513 |
| 272 | SW0724T7 | 431-490 | 575-670 | g3030963 | g389972 | g1060573 | g3679607 | g1391607 |
| 273 | SW0734T7 | 320-688 | | g3037561 | g1068430 | g4851814 | g2198924 | g2240396 |
| 274 | SW0736T7 | 499-674 | | g4735776 | g2458732 | g4451965 | | |
| 275 | SW0744T7 | 488-638 | | g835606 | g4291133 | g1367232 | g879361 | g835655 |
| 276 | SW0751T7 | 1-67 | 348-638 | g2033666 | g4525902 | g4094551 | | |
| 277 | SW0753T7 | 457-734 | | g1281367 | g2013326 | g1423548 | g711455 | g1254955 |
| 279 | SW0768T7 | 1-457 | | g816092 | g2028907 | g1977384 | g4126279 | |
| 281 | SW0772T7 | 1-116 | 524-677 | g1369446 | g989175 | g4685207 | g4736243 | g1629372 |
| 282 | SW0774T7 | 515-691 | | g1280912 | g1516408 | g774134 | g3849587 | g774915 |
| 283 | SW0778T7 | 166-688 | | g709101 | g692097 | g1843758 | g1849532 | |
| 284 | SW0779T7 | 247-777 | | g572918 | g672436 | g2873870 | g2903123 | g4307250 |
| 285 | SW0783T7 | 433-692 | | g2884478 | g2882317 | g3918382 | g2810893 | g1760738 |
| 286 | SW0784T7 | 557-709 | | g1147127 | g2269337 | g3674707 | g1670065 | g3934061 |
| 288 | SW0787T7 | 476-681 | | g1624696 | g2356793 | g1784223 | g1764577 | g1959061 |
| 289 | SW0797M13 | 1-48 | 527-565 | g647094 | g4329924 | g1296124 | g3648342 | g3277126 |
| 290 | SW0803T7 | 464-699 | | g869902 | g698828 | g1496517 | g1521347 | g1512645 |
| 291 | SW0809T7 | 1-120 | 495-699 | g815129 | g814313 | g791801 | g711356 | g565905 |
| 292 | SW0811T7 | 337-688 | | g775252 | g1064596 | g2106148 | g2009858 | g2012888 |
| 293 | SW0815M13 | 411-572 | | g2369395 | g1495178 | g715203 | g1978754 | g893190 |
| 294 | SW0821T7 | 192-692 | | g1847887 | g899896 | g3055436 | | |
| 296 | SW0826T7 | 451-677 | | g4850460 | g864989 | g793071 | g2524536 | g2993137 |
| 297 | SW0827M13 | 476-536 | | g1779025 | g2027299 | g1960180 | g2210077 | g1712368 |
| 299 | SW0836T7 | 485-644 | | g2912733 | g3330967 | g1166303 | g2562807 | g2563437 |
| 301 | SW0843M13 | 114-589 | | g1211744 | g1320893 | g825200 | g817462 | |
| 303 | SW0847T7 | 1-346 | 555-673 | g1547479 | g2410830 | g1012926 | g1505518 | |
| 304 | SW0849T7 | 115-426 | | g2079660 | g3099047 | g2341367 | g2198300 | g2197847 |
| 305 | SW0850T7 | 521-655 | | g1306156 | g1923678 | g2874241 | g2805210 | g4630217 |
| 306 | SW0855T7 | 511-684 | | g2402087 | g1781722 | g1303037 | g2005846 | g2218908 |
| 308 | SW0866T7 | 487-660 | | g1894503 | g2191248 | g3898116 | g1785384 | g1114295 |
| 312 | SW0914T7 | 123-168 | 592-654 | g783104 | g1496681 | g1687044 | g2006571 | g1440899 |
| 313 | SW0916T7 | 541-656 | | g1255268 | g1809627 | g1815279 | g1049496 | g1388310 |
| 316 | SW0923T7 | 461-637 | | g389604 | g1983913 | g573354 | g772210 | g3429552 |
| 317 | SW0926M13 | 315-505 | | g2110746 | g1958300 | g850595 | g1040607 | g848805 |
| 318 | SW0928T7 | 546-645 | | g2835368 | g2159357 | g1320607 | g961005 | g1692986 |
| 321 | SW0954T7 | 351-588 | | g1713128 | g4296983 | g3152028 | g3597337 | g3134671 |
| 322 | SW0964T7 | 275-368 | 455-589 | g2617590 | g1983739 | g2321557 | g661505 | |
| 327 | SW0998T7 | 1-430 | | g1665148 | g873211 | g1734568 | g1722041 | g1137689 |
| 331 | SW1018T7 | 369-421 | | g815990 | g4824527 | g3213763 | g4281629 | g2445651 |
| 332 | SW1045T7 | 171-616 | | g1960129 | g3797281 | g3678504 | g2907669 | g1299288 |
| 333 | SW1046T7 | 1-58 | 227-650 | g1689803 | g747999 | g3094753 | g1969991 | g4599383 |
| 334 | SW1058T7 | 256-734 | | g3076981 | g4764472 | g4244708 | g3675166 | g3057227 |
| 335 | SW1059M13 | 164-451 | | g3146363 | g2842317 | g2291325 | g2035592 | g4076865 |
| 336 | SW1061T7 | 435-732 | | g1720353 | g4083719 | g2188948 | g3649260 | g1966864 |
| 337 | SW1064T7 | 465-642 | | g1898567 | g1984998 | g1577078 | g1969872 | g1577114 |
| 338 | SW1065T7 | 466-723 | | g4737452 | g1721911 | g2567423 | g3595294 | g4564556 |
| 340 | SW1085M13 | 195-502 | | g2994840 | g652041 | g728040 | g1741474 | g3739875 |
| 342 | SW1091T7 | 1-177 | 457-669 | g1139868 | g4740134 | g1123719 | g4690317 | g4690888 |
| 343 | SW1093M13 | 178-372 | | g2876843 | g1212266 | g1277704 | g3842193 | g650405 |
| 344 | SW1097T7 | 345-483 | | g1966405 | g2000446 | g1984682 | g1162830 | |
| 345 | SW1104T7 | 348-667 | | g1987181 | g1975635 | g2575165 | g2901280 | |
| 346 | SW1105T7 | 450-754 | | g3849721 | g4606643 | g1696922 | g2725769 | g3147355 |
| 348 | SW1107T7 | 507-693 | | g4223536 | g2539603 | g4763850 | g3921215 | g4190351 |
| 350 | SW1109T7 | 372-622 | | g1969153 | g4534166 | g3990730 | g3052018 | |
| 351 | SW1114T7 | 436-574 | | g2094727 | g3034248 | g2445722 | g2318514 | g2884719 |
| 353 | SW1124T7 | 424-727 | | g1801953 | g834048 | g867043 | g4599665 | g1491375 |
| 354 | SW1130T7 | 1-151 | 311-411 | g834106 | g857314 | g2880334 | g1166307 | g697528 |
| 356 | SW1132T7 | 428-678 | | g2167403 | g2080455 | g1996679 | g565319 | g659447 |
| 358 | SW1134T7 | 144-267 | 504-633 | g3190963 | g1921067 | g1210922 | g711478 | g874773 |
| 359 | SW1136T7 | 420-635 | | g1740775 | g657385 | g983198 | g831166 | g1959091 |
| 361 | SW1146T7 | 425-631 | | g4524079 | g2154010 | g4703413 | g3648263 | g3752988 |
| 362 | SW1147T7 | 480-660 | | g4739574 | g4301551 | g1312127 | g1721536 | g658245 |
| 364 | SW1156T7 | 1-176 | 409-686 | g1729323 | g1729322 | g1989919 | g1314949 | g1988870 |
| 365 | SW1160T7 | 408-638 | | g2834800 | g3429486 | g3049810 | g1140898 | g3665193 |
| 366 | SW1161T7 | 400-585 | | g2807169 | g4681663 | g4393979 | g1155820 | g1153641 |
| 367 | SW1169T7 | 422-628 | | g2526582 | g2525859 | g3595746 | g4190711 | g4190042 |
| 368 | SW1176T7 | 425-618 | | g1781738 | g2674401 | g1501716 | g656431 | g1522532 |
| 370 | SW1193T7 | 447-636 | | g4391165 | g4295071 | g3146054 | g2357775 | g3238462 |
| 372 | SW1203T7 | 487-612 | | g1012013 | g1388510 | g1716758 | g1264038 | g3330122 |
| 373 | SW1212T7 | 500-640 | | g1384656 | g1696886 | g1891098 | g2825672 | g4084026 |
| 374 | SW1213M13 | 218-503 | | g3076981 | g4764472 | g4244708 | g3675166 | g3057227 |
| 375 | SW1214T7 | 426-611 | | g1386338 | g2162796 | g1616215 | g1965789 | g29070 |
| 376 | SW1218T7 | 424-601 | | g1191932 | g1952078 | g1328929 | g2329319 | g4618462 |
| 377 | SW1220T7 | 1-67 | 487-621 | g1690249 | g1856563 | g1966703 | g1952828 | g1965610 |
| 379 | SW1236M13 | 390-516 | | g875363 | g2100509 | g4187897 | g1623528 | g1157854 |
| 381 | SW1239T7 | 420-480 | 501-620 | g1017274 | g1999568 | g1987290 | g3754140 | g1182700 |

We claim:

1. An isolated nucleic acid comprising a nucleotide sequence which hybridizes under stringent conditions to a sequence of SEQ ID Nos. 1-127 or a sequence complementary thereto.

2. An isolated nucleic acid comprising a nucleotide sequence at least 80% identical to a sequence corresponding to at least about 15 consecutive nucleotides of one of SEQ ID Nos. 1-127 or a sequence complementary thereto.

3. An isolated nucleic acid comprising a nucleotide sequence of SEQ ID Nos. 1-127 or a sequence complementary thereto.

4. A nucleic acid according to claim 1, further comprising a transcriptional regulatory sequence operably linked to said nucleotide sequence so as to render said nucleotide sequence suitable for use as an expression vector.

5. An expression vector, capable of replicating in at least one of a prokaryotic cell and eukaryotic cell, comprising the nucleic acid of claim 4.

6. A host cell transfected with the expression vector of claim 5.

7. A transgenic animal having a transgene of the nucleic acid of claim 1 incorporated in cells thereof, which transgene modifies the level of expression of the nucleic acid, the stability of an mRNA transcript of the nucleic acid, or the activity of the encoded product of the nucleic acid.

8. A substantially pure nucleic acid which hybridizes under stringent conditions to a nucleic acid probe corresponding to at least 12 consecutive nucleotides of one of SEQ ID Nos. 1-127 or a sequence complementary thereto.

9. A polypeptide including an amino acid sequence encoded by a nucleic acid of claim 1 or a fragment comprising at least 25 amino acids thereof.

10. A probe/primer comprising a substantially purified oligonucleotide, said oligonucleotide containing a region of nucleotide sequence which hybridizes under stringent conditions to at least 12 consecutive nucleotides of sense or antisense sequence selected from SEQ ID Nos. 1-127.

11. An array including at least 10 different probes of claim 10 attached to a solid support.

12. The probe/primer of claim 10, further comprising a label group attached thereto and able to be detected.

13. The probe/primer of claim 12, wherein said label group being selected from radioisotopes, fluorescent compounds, enzymes, and enzyme co-factors.

14. An antibody immunoreactive with a polypeptide of claim 9.

15. An antisense oligonucleotide analog which hybridizes under stringent conditions to at least 12 consecutive nucleotides of one of SEQ ID Nos. 1-850 or a sequence complementary thereto, and which is resistant to cleavage by a nuclease.

16. A test kit for determining the phenotype of transformed cells, comprising the probe/primer of claim 12, for measuring a level of a nucleic acid which hybridizes under stringent conditions to a nucleic acid of SEQ ID Nos. 1-850 in a sample of cells isolated from a patient.

17. A test kit for determining the phenotype of transformed cells, comprising an antibody specific for a protein encoded by a nucleic acid which hybridizes under stringent conditions to any one of SEQ Nos. 1-850.

18. A method of determining the phenotype of a cell, comprising detecting the differential expression, relative to a normal cell, of at least one nucleic acid which hybridizes under stringent conditions to one of SEQ ID Nos. 1-850, wherein the nucleic acid is differentially expressed by at least a factor of two.

19. A method for determining the phenotype of cells in a sample of cells from a patient, comprising:
i. providing a nucleic acid probe comprising a nucleotide sequence having at least 12 consecutive nucleotides of any of SEQ ID Nos. 1-850;
ii. obtaining a sample of cells from a patient;
iii. providing a second sample of cells substantially all of which are non-cancerous;
iv. contacting the nucleic acid probe under stringent conditions with mRNA of each of said first and second cell samples; and
V. comparing (a) the amount of hybridization of the probe with mRNA of the first cell sample, with (b) the amount of hybridization of the probe with mRNA of the second cell sample, wherein a difference of at least a factor of two in the amount of hybridization with the mRNA of the first cell sample as compared to the amount of hybridization with the mRNA of the second cell sample is indicative of the phenotype of cells in the first cell sample.

20. A method of determining the phenotype of a cell, comprising detecting the differential expression, relative to a normal cell, of at least one protein encoded by a nucleic acid which hybridizes under stringent conditions to one of SEQ ID Nos. 1-850, wherein the protein is differentially expressed by at least a factor of two.

21. The method of claim 20, wherein the level of said protein is detected in an immunoassay.

22. A method for determining the presence or absence of a nucleic acid which hybridizes under stringent conditions to one of SEQ ID Nos. 1-127 in a cell, comprising contacting the cell with a probe of claim 10.

23. A method for determining the presence of absence of a polypeptide encoded by a nucleic acid which hybridizes under stringent conditions to one of SEQ ID Nos. 1-127 in a cell, comprising contacting the cell with an antibody of claim 14.

24. A method for detecting a mutation in a test nucleic acid which hybridizes under stringent conditions to a nucleic acid of SEQ ID Nos. 1-383 or a sequence complementary thereto, comprising
i. collecting a sample of cells from a patient,
ii. isolating nucleic acid from the cells of the sample,
iii. contacting the nucleic acid sample with one or more primers which specifically hybridize to a nucleic acid sequence of SEQ ID Nos. 1-383 under conditions such that hybridization and amplification of the nucleic acid occurs, and
iv. comparing the presence, absence, or size of an amplification product to the amplification product of a normal cell.

25. A method for identifying an agent which alters the level of expression in a cell of a nucleic acid which hybridizes under stringent conditions to one of SEQ ID Nos. 1-850 or a sequence complementary thereto, comprising
i. providing a cell;
ii. treating the cell with a test agent;
iii. determining the level of expression in the cell of a nucleic acid which hybridizes under stringent conditions to one of SEQ ID Nos. 1-850 or a sequence complementary thereto; and
iv. comparing the level of expression of the nucleic acid in the treated cell with the level of expression of the nucleic acid in an untreated cell, wherein a change in the level of expression of the nucleic acid in the treated cell relative to the level of expression of the nucleic acid in the untreated cell is indicative of an agent which alters the level of expression of the nucleic acid in a cell.

26. A pharmaceutical composition comprising an agent identified by the method of claim 25.

27. A pharmaceutical composition comprising a nucleic acid which includes a nucleotide sequence which hybridizes under stringent conditions to one of SEQ ID Nos. 1-850 or a sequence complementary thereto.

28. A pharmaceutical composition comprising a polypeptide encoded by a nucleic acid which includes a nucleotide sequence that hybridizes under stringent conditions to one of SEQ ID Nos. 1-850 or a sequence complementary thereto.

29. An isolated nucleic acid comprising a portion of a nucleotide sequence of SEQ ID Nos. 128-383 or a sequence complementary thereto.

30. A gene which hybridizes to one of SEQ ID Nos. 1-383.

31. A method for detecting cancer in which one or more of SEQ ID Nos. 1-850 are used as probes, said method comprising:
i. collecting a sample of cells from a patient,
ii. isolating nucleic acid from the cells of the sample,
iii. contacting the nucleic acid sample with one or more primers which specifically hybridize to a nucleic acid sequence of SEQ ID Nos. 1-850 under conditions such that hybridization and amplification of the nucleic acid occurs, and
iv. comparing the presence, absence, or size of an amplification product to the amplification product of a normal cell.

32. A method of claim 31 in which said cancer is colon cancer.

33. A method for detecting cancer in a patient sample in which an antibody to a protein encoded by SEQ ID Nos. 1-850 is used to react with proteins in said sample.

34. A method of claim 33 in which said cancer is colon cancer.

The application's sequence listing, which the Patent Office published only in electronic form, follows.

SEQUENCE LISTING (850 sequences)

SEQ ID NO: 1 - DNA, 359 bp, Homo sapiens
tacaaaactaacgatgaagttattcatggcatcttcaaagcttacattcagaggctgcttcacgccttggctcgacactgccagctggaaccagaccatgagggggttcctgaggagactgatgactttggggagtttcgcatgagggtatcagacctggtaaaggacttgattttcttgatagggtctatggagtgttttgctcagttatattctactctgaaagaaggcaacccaccctgggaggtgacagaagcggttctctttatcatgactgctatagcaaagagtgttgatccggaaaacaatccaacacttgtggaagtcctagaaggagttgtccgcctcccggagaccgt

SEQ ID NO: 2 - DNA, 901 bp, Homo sapiens
  misc_feature (1)...(901): n = A,T,C or G
tacactaccttttaaaaaaaattggtatatattacttttactgtaaagaaatgctttaaatcaggggtccccaacccccangtcacanacctgaangggtccatgntatgnnatgaaccangccacacagnnggangtaagcanctgagagcgagggaagcctagnntgnatttacagaaaagggaagctncatctgtatttacagccactccccactgctcacattatggcctgagctctgcctcccgtnagatcaggagacattatattctcataggagcatgaacactattgngaactgcacatncaanggatctgggttgtctgggttgtgcgctccttataaaaatctaatggtggatgatttgtcactgtctgccatcatccctagatggaaaacaagctcacccaaagtctcncttntgccnaggngtncctgatgccaagattcncatttttgacctggggcggaaaaaggcnaaagnggatgagttccgctttgnggccacatgntgtnagatgaatntgagcagctgcctctgaagccctggaggctgcccgaatttgngccaatanntaccccgaagcgctggtacgattcccaaggggagcgccttttacactgngccctganacttcnnttccagatcggtcnggccttttaacttttggtttcccgtttgtcaaangacattgcttcctttanttttncagctggtgngncttggaaaggattgggccctggcttctcnaggatggctaaggatgaanngatatcaaggnctggcatgaaanaantcnccggtccnnctttnggctnggttnccttgggacctggccgggccggtccgtttcgaaagggcnaaattctggcagaatttccttganacctgggcgggg

SEQ ID NO: 3 - DNA, 553 bp, Homo sapiens
  misc_feature (1)...(553): n = A,T,C or G
actgctttctgctgccgctcaggatagcactggctttcacagggattanccttctggtggtgggcacaactgtggtgggatacttgccaaatgggaggtttaaggagttcatgagtaaacatgttcacttaatgtgttaccggatctgcgtgcgagcgctgacagccatcatcacctaccatgacagggaaaacagaccaagaaatggtggcatctgtgtggccaatcatacctcaccgatcgatgngatcatcttggccagcgatggctattatgccatggtgggtcaagtgcacgggggactcatggntgtgattcacagagccatggtgaaggcctgcccacacgtctggtttgagcgctcggaagtgaaggatcgccacctggtggctaagagactgactgaacatgtgcaagatnaaagcaagctgcctatcctcatcttcccagaaggaacctgcatcaataatacatcggngatgatgttcaaaaagggaagntttgaaattgnagccacagtttaccctggngctatnaagtatgaccctcaatt

SEQ ID NO: 4 - DNA, 565 bp, Homo sapiens
  misc_feature (1)...(565): n = A,T,C or G
actgctttctgctgccgctcaggatagcactggctttcacagggattagccttctggtggtgggcacaactgtggtgggatacttgccaaatgggaggtttaaggagttcatgagtaaacatgttcacttaatgtgttaccggatctgcgtgcgagcgctgacagccatcatcacctaccatgacagggaaaacagaccaagaaatggtggcatctgtgtggccaatcatacctcaccgatcgatgtgatcatcttggccagcgatggctattatgccatggtgggtcaagtgcacgggggactcatgggtgtgattcagagagccatggtgaaggcctgcccacacgtctggtttgagcgctcggaagtgaaggatcgccacctggtggctaagagactgactgaacatgtgcaagataaaagcaagctgcctatctcatctttccagaaggaacctgcatcataatacattggtgatatgtcaaaaangggaagttttgaaatgganccccagtttaacctgnngntttnagtttnacccttaatttggcaagccttttggan

SEQ ID NO: 5 - DNA, 500 bp, Homo sapiens
caggtacacattcaggggtcactgactcttcagataatgccctaaacaactggagtgtgggcttgtttgctccaagagcagctgccctgtcagtggaactccggcgcacttccactcaatactggactgggggggatgaaagagggatttttaaatggcagaaaagtgttcttctgggctgtctggcccgggcagggcgggttgtgacttggaaaagaaggggaaggtagggaggccttgaacttagggacagccagcaaatgatccttgcagcttttggaacacaaggcagggctaaggttacctttcagcttccttgcttaagtagcagtggctaagtgggttaaactttgctcggcctgcaggctccccctgttggtcagatacttgcattgacatcctcagtgttcaatgctcctggaagagcccaggagagggcggcactggcccagggattgcaggtcagggaactctagcaaattcccacaccctagggtacc

SEQ ID NO: 6 - DNA, 622 bp, Homo sapiens
acaaggaaatgtcagtcaggggtgttgcatattacatacatgtggttaccgaacttggtttacattattgattaaattcattttctctttctcttttttagacctttggatatctcctcctccttccccttatctataaatatgtaagaaagaaaacatgtttaaaatacaatattttatttcttttgatcacagattagacttaaagaacagagatgccctataatgtgatctttaagagatattacaaagcttccaatctcactgtgaggatcgttaaagtataataataaaaaaaaatgtatattataaaagaatgtaagaatgtgcatatttatttccttgcatattaatggcataagaaactgttaacagggacttggggtaaggcttgtgggaaggaaggtagttttcactgtattccttttgtattgttttaagtttttacttgttttttaagcaagcatgtatcactttatatgatatttaaaagttgctcttctcaagacagaaaatcattttgattcatttctaattcaaataagcactaattgaggatattttaatatatcctcacattgtgaaaggattaaggcacaatttctagcttcaaaactgtacc

SEQ ID NO: 7 - DNA, 621 bp, Homo sapiens
  misc_feature (1)...(621): n = A,T,C or G
ggtacccttgtctttaaaaggattcccccttataaggactcttcaagtaaatccacacatatatagtcaactaatttttgacaaagacaccaagaatacacaatggggaaaggatagtgtcttcaataaacagtattggaaatactggatatccacatgcaaaagaatgaaattggatgaaatatggtgaaattattttacaccgtaccggctccccaacgtgcacggcaggagctacggcccagcgccgggcgctggccacgtgcagaaatggagtttcatcatgttgtcctctcgaactcctgacctcaagtgatccacccgnctcgcccttccaaagtgctgagattacaggaagagtctaacctgctctgcaagctcttgagtcccgccaagatgatatttaaaacgtctgtatgaagttgaaagctgcagntgatggcctnttcaagatgattcaaaccncngatgcnnacttggatgtaanccaccntaattcaagccggtnannccncnnanttaacccnaagggcctggatttgaattcaggcnttggnaaggttnccgggcccttaaaananattggggttaacgcaaaccggcttccnttccttttcttgn

SEQ ID NO: 8 - DNA, 649 bp, Homo sapiens
actgatctcctgttggcctgcttcatttgtcctgcagttgtcaatccagaacaatatggaataatttccgatgctcctattaatgaagtagcacgatttaatctgatgcaggtaggccgccttttgcagcagttagcaatgactggctctgaagagggagatccccgaacaaagagcagccttggaaagtttgacaaaagctgtgttgccgctttccttgatgttgtgattgggggccgtgcagtggagacccctccattgtcttccgtcaatcttctggaaggattgagcagaactgtggtttatataacctacagtcaggcttattactctggtgaattttatgaaagagtgtgatgtctggagatcaactgagagaagatagaatggctcttgacaatttattggcaaacctacccccggccaagccaggaaaaagtagcagtttagaaatgactccctacaatacacctcagctatctccagcaaccactccagcaaataaaaagaatcgattacctatagcaactcggagcagaagccgcaccaatatgctaatggacctacatatggaccatgaaggatcatctcaagaaaccatccaggaggtgcaaccagaagaggtgttggtcatttccttaggtacctc

SEQ ID NO: 9 - DNA, 645 bp, Homo sapiens
acttagtgcaacatattgaacttaaattccagttttcctggaattacttgtgtcttgagctaaaggctgtatttgatataacagggaaggaaagaaattatttttcctataaaattagtttagtttaaaaacacatataattaaacaaaataaaaatattattccatcttttaaagaacatttactaattcacagatattacccgaagtttagaaagtcacctaagaacaattgtttaaaaattatttagggaaaatgaagcaaaattgttttcaatctgagattttaacagccagtgcactcctgttcctcagctgaaagtccccttcattctgaatgtctgcagtagtattgaattggggagcagttaggttccagggacatattcactcctgttttgttctcccatcaatctcagccctttcggtgactgtttgggcaaagcctcccttgtggtagaagatgcctcacttctggggagaagaggctcctcatcttgcagacaagaagcagcacccactgtttcttgctccaaaagccattaacattataaactggccagttgcagtggctcaaacttgtaatcccagcaccttttgggaggttgaggcacaaggattgcttgagcccaggagtttgagtacc

SEQ ID NO: 10 - DNA, 564 bp, Homo sapiens
cgcggccgaggtacctgggcttaacagtaatagagaacctcatttataccatacagacacagcaacttaggaagacagcactgatagcatttagctagttgtaaccaaatccaaatatgtaaaattgagaattatgattaacatatgcaactttagtaataggaatagatgataattttcctgtattgtttcaaataagtgactgttcagctgggatccattggattataatttacaatgtcacataatattatgcttttcaatattgatgagtgatgtaaacaatataaagttggcagtttgtagtagttcagtatcctagaaatacattgaacttcataagtatcagttcatttttaagcatacagaattgaactgatacttactgaaatcataaactcagaggaaacaagcccatctttatcactaattacttagcttgaatacttttctattttaaaataatcctaattattgccttttcaattatagtctactgtatttatttatatgggatcaacaggtatttatcaaacatctactgtgtgcccagcactacctagt

SEQ ID NO: 11 - DNA, 593 bp, Homo sapiens
  misc_feature (1)...(593): n = A,T,C or G
cgaggtgcctcgcctcgggcattttcttgcagcaagaagggacgcatgcctctggcataaatccaaccagagagtcacccctctcaagctgattttttaaaaatctagatattatttagatcatttcagcaaattcttaatgctttggcctttcacagtaagatgttgcttaatcggctggatctcccccctccttgccaaggagactcaattttgcagttgcccatatctgcctagttaaatcgttgctatactaaaggttctgggagggtggggacagaatttccccggtgctaatgcggcactgaatcgcaggaggctgccatgcatttcttcagtcatctacaaccaagaattctcagagcagtccctcggcagccttttgaagctgtgctagagcagaaagctgctattgntctcatctctcaacaaggaaaggatcaaactttgcctctttcaatttgaaagatttttttttatggtggtggggggaagggattgcaatcttgatnctcaagttaactttgaggatttggagtggtctnccagtttaaactgcagatcaaatcacagaagccctaacgcctgcatnt

SEQ ID NO: 12 - DNA, 602 bp, Homo sapiens
  misc_feature (1)...(602): n = A,T,C or G
acacacaattccactctaccacccaacatcaatgagcatttattgagcatctactgaagctcacagcattgtgcaggcaggatacatatcatacaaatgctgtttcctcctcccaccaaatgagggagaattagatgagatttttaaaaattcctcctagttctacaaccagtattgtatactgatccaatttggaagtttaagtttaaaattaattcaaggattccagttgaggaaatggtcccacttccttggaaagtaaactagctcggtcaccaggctaggttacccacgttgtaattgcttgtgattgactactccaccgtattaatgatgaagtgcccccgacttgagatgcaggcgttagggcatctgtgatttgatctgcagtttaaactgggagaccactccaaatcctcaaagttaactttgagtatcagattgcaatccttcccccaccaccataaaaaaaaatctttcaaattgaagaggcaaaagttggatcctttccttgttgagagatgagaccattgccgctttttgntntagccaggtttcaaanggttgccanggactgntntganaatctnggtgganaaaan

SEQ ID NO: 13 - DNA, 487 bp, Homo sapiens
gcgtggcgcggccgaggtactggaggccatccagcccataccctggcggggggcaaacctcagatgcctccttcttgggtttcattgggcaccaggatccatcttccatgaattggatctcatcacaatctgaacaggaactaagaatctccataaataaaccatcaatgataagagattcatagggagccttcttgtcacacacaggacatgtccatgtaggcttcttctcattcatctgtagataaagggcagcatcgaagctctgcaggtgggcgcaggtgagggcacgacaagggacagtcaggcgcatcttccctagcgggcacatgagtgacacccggagacttgtagtggccacctcactgtcagggtcagcagtcaatttctccttgatcagtgcccgcgagtggtctgggttccggataccctttgctctgagtttttgtagaagggttcctgcagtcaactgcctcaccaggtacct

SEQ ID NO: 14 - DNA, 300 bp, Homo sapiens
acagaaattcttaactgcttatgaaatgctgattgttaaacagcatccacagctattttgtgttgtttccctgaccccaccctgaagaaaagaaaaattatggcatattgaaaacagcagtatgatgtaagagaaaagatcacaaattccttgagggtgggtcttttccatactcataagcctatttataatattcagagtaatttattgacacatattaatattccctcctatcccattaattgccaaatcatcaaacatttattgagcacctactctgtgtagggtgtaagcagtacc

SEQ ID NO: 15 - DNA, 882 bp, Homo sapiens
acctcataacaaatgcctgccatgtgttccagattcaccttctttctttctgccccagccctggaatcagctgcttctccaagcactcaggactcctcttaacagagaatgataaatacttagaaacccctgaggcccggtgtgctcagtgttctaggctgtcctccttctaagcccttctcgtggccagaaccacacaaagtatcatcacgacagctttatagtaagtgctggtgtttgcagggcaaatggccctcttcttcacaagtgttttaattaatcctggacttgcactcttctcagtgaattctagtcaccttgtcaggaaagagaagtggctggatgtcgatgggaacgtcattgaatgttaagagcaactttgggagacctgacacctggcatcttcctttctctgaacatagaggagaattaagcaaatcttccttaaatgtccttcaataaagtttatatattttctgcatgcagatcttatctgtcttaaaatttaccccagatacctttttgctactgtaagcattatgttttaaattacattttgtaaccaattaaattgttggtttaacaaaatgaattgattttatattttgatcttaaatttgctcaactctctaatctgttctgagatccctatttaggaaattacatcacatcacatgccagtaacagcagttttatttctgcctttttcaccctctgccctgctgaaaacagtgttgtgaggctgaggatgatgtgggttacacaaaacttggctgcactgcaggggggaatggaaatctacataaccaccttggaaaaatcgatatgtatcaatatgcagacgtctgcgttatcctgcagaactggacatttgcacgtacc

SEQ ID NO: 16 - DNA, 568 bp, Homo sapiens
  misc_feature (1)...(568): n = A,T,C or G
ggtactcccggctttacagttaaaaccagttttctgggaacatttgtcaaacacagggaaaggctgtccttttaagttagtgtttactgcatttcacctaagactaaatggacaaatgaattataaattcattttttaggaggcataataaactttggaaatattttttcttaattagagggaagaaatgagcaaaagagaacccgaggctctagctagaagcccgtgtttctctgccctaattgcatcaaacaatgccttaataatctgtgtcttcatgtgggaggcatctactctgtcctctactttttcacttttatgcaaactcaggggaaactcaggggaaaaaatgattctatgaaattataattagagccatatttctagattttaattttcaacattggcatttattaatttcctgcagctgctgtaacaagttaccacaaactggtaaaaatggcttaaaagaacngaaatttattttnctacaggtcaaggccggaaatnccaaatctaagcatcangggggtggggtccctttggangntcccanggnantttttcc

SEQ ID NO: 17 - DNA, 584 bp, Homo sapiens
  misc_feature (1)...(584): n = A,T,C or G
acaactgaagaccctagaaataagggtttcaaccctggttgcccattagaatcatgaaagagcccccgagatttgggttgaattggtctgcagagactccaggccccttcttttgaagctccacagatgattcttttctgcctgaggggaggtgctgagttcccatcacccaccagcttcatcctacacangtgcaatnagaggcctagtgagagtggcactggggggtggccccccagcgagtgccaagtagatcccaccaggcccttnctttaggccagaggttctagaaactttgatgaatgtngcaataaccagggggtgctctgaaaaggncctanggctgggctgcacctgntaaaatnaagcccagtctttctggttgggaccagaagattccnaagggcagcncgctctttaaaaaccaagtgcctttctgntaaacnaatccttaggnccnttatgtctgcagttnttaagntaangggttggtaagntantaacntccattaantttnagtntacacttaagcttttgggggtatcngnttnnagtgnnattangnagtctttcacaggtngtt

SEQ ID NO: 18 - DNA, 560 bp, Homo sapiens
  misc_feature (1)...(560): n = A,T,C or G
ggtactcaaagcttggactccatccctgaaggtcttcctgattgatagcctggccttaataccctacagaaagcctgtccattggctgtttcttcctcagtcagttcctggaagaccttaccccatgaccccagcttcagatgtggtctttggaaacagaggtcgaaggaaagtaaggagctgagagctcacattcataggtgccgccagccttcgtgcatcttcttgcatcatctctaaggagctcctctaattacaccatgcccgtcaccccatgagggatcagagaagggatgagtcttctaaactctatattcgctgtgagtccaggttgtaagggggagcactgtggatgcatcctattgcactccagctgatgacaccaaagcttaggtgtttgctgaaagttcttgatgntgngacttaccacccctgcctnacaactgcagacataaggggactatggattgcttaacaggaaaggcactngntctcaanggcggntgcccnttgggaaacttntgggcccaccccaaagaatgtggntttnagtttttcnn

SEQ ID NO: 19 - DNA, 425 bp, Homo sapiens
ggtacaaagagaaaaggtcaagacatttttcaaatgagggaaaactaacaggatttatcactagtaaacctgctctaaaagaattcaagggaagctttttaaaaagaagggaagttatagcagaaggaaacttagaatggcaggaataaagaaggcataatgtatagggtaaatataatagacttctcttgaggttttaaaaattacatttgttatttgaaagaaaaaaattaacgttgttgtatgtgattctctgtagaggatatacagttttttttgttgttcttgtttctgtttttttaaggtgaagtctctgtcacccaagctggagtgcagttctgtgatcatggctcactgcagcttcaccctgggttcaggtgatcctcccacttcagcctcttcagtaactgggactacaggcatgt

SEQ ID NO: 20 - DNA, 655 bp, Homo sapiens
tgttacttcccaagcactgtagggcgtaaggaaaatctggtccttatcaaatcccaggagcttctgcttagttggggaagaaattacatgaagcaaccagaggttataaggccacacttgtatatcgtgcaccctgtgtggacaagattagggactgttgagagaggaggaaaccagtagagagcaaagctctacccaggctccttgtaagcctctgggctcccccgagagggcctcgctactctacgcttccctagcaacgttgatgtccccacaaccccacatcagtgcagctgtggcttgtgtggaggggctctgaggcctctgaggccagatgtgtaaacagtgctgaggttcagtaataggatgaagtcttcaggtgtggagcagcccaccttggctcttcccatgtctctgtgttacttctcatattctgctgtcctttcaaacttcaaggacagtattaatttatactagtatttcttcctcagttttgtgacttgaatgcagtgagtgccttagaggatccaaggatgaaggaatgcgggttggtggttctctctttcagaatgggaacttcccaaaaatggggctgcgtctcgcctctcagtaggttccctacctctgggtcttccacccttcaaaatctggtacc

SEQ ID NO: 21 - DNA, 566 bp, Homo sapiens
ggtacagccctttctttgaatggggatctggggatgcagaggagcataatgagccttttataattacaaacatgctcttctctagctcttaaggttatgcctaacgctcatttgctcttggctaaaataactgagaaaaaaagtgagtagtaaaaaaatgctggaagtctgaaaatggtttagacagaacttcattcctgaagttttagtctgtagccagattttaattctggcctgttttggtttttagatgatagatcttttagtgtgtcaacaggaatgtaaagtttgtattaacatctagggtgatcacctgccatgctattaagtcagcatggtataattaaaagttacatatgtaggttcagagcctcttagcacagtgttacattgtaagctcttggagggcaggaatgagattctagtccttacggaaatggagtttgggcttctatccctagcattcattctagtgccatgcacgtggtaggaattctgtaaatatttgtgaaagaaatgaatttctgcctgtagggttcagcagtgtatacttaaatgtgatgtgt

SEQ ID NO: 22 - DNA, 269 bp, Homo sapiens
ggtactaatagcaaggaataatcctaaacattttcccaataaactgactaagcctcaaaaggacagcttaggaaaatgattaacatgcagtttttcttttttcctagccaattcagttctacttagataaatctggttgccaatcaatacatatataaattaatttttttctgctcaattactaccattttttctttttcaccttttccccaattttctctagcaacacttttcctttggtttgatcagttgaactcaaaaggtttggt

SEQ ID NO: 23 - DNA, 815 bp, Homo sapiens
gaggtacccttcatccatcaggactgcacctcctttcccatgagccttctggggtcacattctcctaactgcagctactgttgctgttttacttatcgagggcctattacgtgccaggctctgcgctgaacgcttcacgcccactggatcatttactcataatagctcagtaaggtagttaccccaattagccccatgttagagaaaaacaccaaggcacagaggtgagtcacttgtcccaggtcacacatctaggaagtagtagaaccaggactcagctcaggtccaaagtctcaaccatgggccagtctgctcatcttagtcaaacccccaggctgcattctgtggtccagctactggatcctgcaaccttctcagactctatccatgaagccaagtgcacaggatctaggacatcaggtccagaaaaattggggccacattcttctggacctgcagatgggcaaggaccagactctagcctgaacagtgagatgcagcccagagaagtgggaatccacagacagagcctggcctgagactcctactgagactgcccatgtggccactcggggagttcccgtcccctgcctgatcagcagtctttttgcttccccctccaagagagctggggggcattcctccaggaagcctgatatgtaacaaactcctttcccatttcttgctttgcttaaatctccaaagtccctggagctgaagccaagcgggcctcattaggtccactttacagaaaagcaaactgagtctcaaagaggggaagtcactgagccgggtacctgccgcgggccgctcga

SEQ ID NO: 24 - DNA, 555 bp, Homo sapiens
ggtacctgggcttaacagtaatagagaacctcatttataccatacagacacagcaacttaggaagacagcactgatagcatttagctagttgtaaccaaatacaaatatgtaaaattgagaattatgattaacatatgcaactttagtaataggaatagatgataattttcctgtattgtttcaaataagtgactgttcagctgggatccattggattataatttacaatgtcacataatattatgcttttcaatattgatgagtgatgtaaacaatataaagttggcagtttgtagtagttcagtatcctagaaatacattgaacttcataagtatcagttcatttttaagcatacagaattgaactgatacttactgaaatcataaactcagaggaaacaagcccatctttatcactaattacttagcttgaatacttttctatttttaaataatcctaattattgccttttcaattatagtctactggatttatttatatgggatcaacaggtatttatcaaacatctactgtgtgcccagcactacctagt

SEQ ID NO: 25 - DNA, 413 bp, Homo sapiens
ggtacaagctttttttttttttttttttttttttcctttcattgtccagtccccatgaattatttatttgttattaaattcaactgaatgagatttcaaagcaacgaaaattgaagttcaaatgaaaccaaattaccactctgagctccaggtggccctgacagcccagttttgtgaagggcccctgaggctgttcactgaatctgagatgtcaccaggcatggagggtctctgatcagcatccagagctccagagtagggagcaacccctcaccaccacttctgggccccaggcaaggcagagaccaaaagaaccctggtaaggttccccaacctccatgttcatttaaaaaaaatgtttaaaactgacaaataataattgcatatattcatggggtccatcatgatgtttt

SEQ ID NO: 26 - DNA, 638 bp, Homo sapiens
acttagaatcgtgtgtccatctgaagccagtgcagaggccaaagtcagtcaatttaatatgaccatcacgatcaatcaaaatattatcaggtttaatatctctatgaataaaacccattttaaggaacacctttcaaactgcacaggtaagttctgctatgtagaatcgtgccagactttctggaaagatgcccattctaattaataggctcatcatatcacccccaggaatgtagtccattacaaagtataaattgtccttatcttggaatgaataatatagacgaactacccattcattgtcagcttcagccaggatatctctctcagccttaacatgagcgacttgatttcgaagaagaacatctttatttcgaagagtttttgttgcatacaaagccttagtatctacttttcttgctagacagacttcaccaaatgctcctattcctagtgtctttatcttcacaaacatagacttgtccattttagcccttttaagacggatgtaattagattctttttggcaaagcatctttctcatttgatcctgggcatcttgagataatccaacccgcatcatttcattctctaattgttttttacgatgtagacgctgctgatgagatttgagtacc

SEQ ID NO: 27 - DNA, 236 bp, Homo sapiens
ggtacacgtcgttctcttcaagatctcatagacaatcgtgctccgggttttgctgtcgaaaaaggaatccttatcagacaagtcaaatagatgctgcttctcccgggagaagggataggagagtctcttcatggtctggggcctgtgctcagccactttgggctggatgggatctgtgattttctggagcacagagttgatttttttcaggaggccacgggtctcattaatgtggt

SEQ ID NO: 28 - DNA, 607 bp, Homo sapiens
ggtaccacgggaaagatcaggactttggctgcacccttttccagctcctccatgttacagatcatatgggcacaagtggtaaaaatctccacggctcgggaacgggttcgaataccatacacctcagccatggtgaagatcttatacatctctgggagaatgacaggagcaacaaagtggcatctgtgtgtctgttactttcacgagtgaattctgtcagcacacgcatggctccatggacggcatttaagtctccgctcaccaacatctccatgagcaggttgaagagttggggccaagcttcaggccagtcccagtgggcaatggctgacactgcataggccacactggagcgcactttgcttatcgattctctcaacccattaggcaatagctcccggataacaatttttgccctttctgtagtttcaggaggcctaaatttctctgattgggcacaccagtgagtctccacatattgtttcaagatgactgatgccagctgacggattgccagtgccccctggggatctacagtcagttctgccaagtgaacaccaaattcctccgtcacctccagcaccttaatctgttcttcagcagccgc

SEQ ID NO: 29 - DNA, 612 bp, Homo sapiens
  misc_feature (1)...(612): n = A,T,C or G
ggtactaactcgctttacctttctgatattcgtcctaagattttacttcctattatatagtgtttgcagtataccagggtgaaggacctgtcacttcttaatgaatggccttggtcaagggtttttaaagtttcaggtcagaaatgtggatgtgaaaaaatgttttttaagaccttcacaggcttactagtatcacagcaataaatgattctaccaggatattcttcgtagacttagttggcctggaggtagacttttaaggatatatctgtgcttctgaataaaattagctaagaattcaacattatggaattcaataaattccagggggaaatcagtgaattaggatacactgcctcttaaattctaaaccctatatatcccacctgttgcatgtanggggcatgtgtgcatgtggcatcaaaactagctgnggacccttttttttccataaaatttggncntactcatccttgggngaaaaanccttgaaggnaaaatctggggtnaaaaaaaagctttgggctgtggaccaaccttccangttcccngggaagggattnggacctagnaaaaannccntggaantggcttgggccttggattactgcn

SEQ ID NO: 30 - DNA, 286 bp, Homo sapiens
ggtactgttatcatagcagcactatccaacatgaaagtaatcttataatttgcatttgtgcccactcccagctctttcattttagcttcaatccacttcatatttgttgcagaccaaataacaatgtcataatcttcataggcagatgttagaaattcatgaagatatggccgcattaattctaccccagtctctgcacaagacctgtggtcaaataatgtataatcaacatctagcaccaaaagctttttcccttccctgggaggattcaaaatttccactttgc

SEQ ID NO: 31 - DNA, 606 bp, Homo sapiens
  misc_feature (1)...(606): n = A,T,C or G
accttattttgctgagcttattatataataccagagcagaatagaaggtagacccacgggaattcaaatcttggctgtgccacccacttcctgggcaagtcacttcctctctctgtgtccatttccaaatctttgaaattcagttagaaacatcactttaaaaacagggttgttgtgaagattttatgagataatgtataaaataagttcttaccaagtatcagctatgatatttatgatattttagagttattaattatactgtgaggattaaggaacttggcagaggaatacagtaggtgcttaaatggtatcctaaaatattatttaaaaataaatgacagtaatgggaataccgcaattacttttgcaccaacgtaataatagtaggatatttaaagttgagatcacaggaatcagtgcagatatgtctcattttacccacaggtggcgctcatggccgggttaaattctgaaaaaccttaaaaagtcccttgggcgngaaccnncttanggcgaattcccgnncactngngggccgtctaanggannccnatttgggccaacnttggggaaccngggcanaccgntcccggggnaaatggn

SEQ ID NO: 32 - DNA, 615 bp, Homo sapiens
  misc_feature (1)...(615): n = A,T,C or G
ggtactcatgcatcttcatgagcagctctcttatcttctcagtaacatagtcacctcctcactggaaaggtctgtattttatactcttttgggttaagtcactggcagacagaaacatcaatatcctaattcaggatggatgccacagtctgcccagttagctcattaattagataattctttaaaaatattgacaaaccattaattaagagctgattattcacacatcaaacaattcttcacttaaactagaggatttctttaaatagcagctccccctggctgcatttatctctttgtgtaagtttattagctatttggcagagaaatttcagaatgccagctacaagtcagtgcagttgaagaacagaatgtaatggagggaaagtatttctggaagcatggcatttattccaagaaattatctaagaatgnaattcctttggaaagtgcttaatataattatatatgnaatcncaattaatttcttaaataantctngggaatggnccagattttctggtttggaaaagcccgggtntttngaatccaaataanttgnccaggctttttnnntnngnccnnggtngaccngggttngattcaangtttcnn

SEQ ID NO: 33 - DNA, 297 bp, Homo sapiens
acagacttccatctccccaacatcttgaagatgtatcaatttttttaaattaagaattactttaaacagcactcatttcagaagataggcagaggttatcaaacttctgctccaatcttctcattattccaaggttcataaaaaccacttaggaagaccttggttactgtgacacatcacagctataagtgtaggtggcctagactctccctatctcttagctgccctgagtcatgtgaaataagatagtgaccttctccatcatccctagaggctctctccccgagagagagtacc

SEQ ID NO: 34 - DNA, 468 bp, Homo sapiens
actgtttagtgggatccattttatacaggtgacggtcagtgacaaaaattgctctgtcttccaccttactaaatcgatttaccttacggacgtgacaggaaaagaggacattcatgtatttgtccttccgtttcaattcattagcaacagggacaaaagtgcctgaggtctgaggtgtatctggctttgaagcaagatagttgccctcccaggccctctggagcccgaggtcagccctttgacccttcaacatttccacggctgcaacctttgccctgacctggggcaggtctgaggccggaatgctcttgatgagctgggatgctctccatctattgaaaatcgtctgcagggcctcctcaaaacggcgaagaactttaggagggcttggccacttcacgtgcttcccgtagtctcgcatggtcttgacgccatggaaacgtctggccacctcgtggatgtacctcg

SEQ ID NO: 35 - DNA, 314 bp, Homo sapiens
ggtacttatggctccagataaaatctctggtggccacattattcaagactttttaaagtgctttatctgaaatatcttcatagacatgaatatgaaagttctgaaaattgtgttcaatggcccgtgtgtcccagaagatcctaatgtaaagatgcatatttataaagtaatttatagaataggattaaacatatgtagaactttattaagaaaatataatgactttgggaccaattacaggcccttgaacagccacaataggctcaggagggctgtgcttctgtgtaaagtcccctcccagacaccaccagggt

SEQ ID NO: 36 - DNA, 600 bp, Homo sapiens
  misc_feature (1)...(600): n = A,T,C or G
acccaatgtcatgggaatgatgtgcctgtcacccccattggacaagctggggaacagccatagggggaccagcttctgccagaagttggtgtctctcttcaatttccacaactatgacaacctgaggcactgtgctcggaagttagacccacggcgtgaaggggcagaaattcggaacaagactgtggtcaacctgttatttgctgcctatagtggcgatgtctcagctcttcgaaggtttgccttgtcagccatggatatggaacagaaagactatgactcgcgcacagctctgcatgttgctgcagctgaaggacacatcgaagttgttaaattcctgatcgaggcttgcaaagtgaatccttttgccaaggacaggtggggcaacattcccctggatgatgctgtgcagttcaaccatctggaggtggtcaaactgctttcaggattaccaggaatttctacacaaccttttgaaactcaggcttgagggcacaanntgaaggccctnttcnaaangaaacttttaaaaagccttnggttttaacccncgggtcantgnnnaatccctggtttaanaaaaaancctngacttggccg

SEQ ID NO: 37 - DNA, 516 bp, Homo sapiens
ggtactgctgtaggaaagaaattaaggacagttagtatgggcctgtgaattctggcatacatgtttaaatcaattacaattatgcaagtaaaaaaaggatatcccctactaattcatgcaggctgaaaagtctagtatgtaaacctgcagcagaatctaattttaagaaacaggcacctaattttgattgtgaaactcactcacctgaggaaagcttccatcaggctcactatgccccttgtgctgacttgcacactaaaattagcaaaacagactccaactattaaaaatatcaaactcttcgtatacatacttttgttttaactttaagtatgcttagagcaaagtaggtgcctttactaagctatatttagagcactatggggggagctctagtgtgagaaacagtttctcaagggtaacaatcctaaaaatctaggatttggaatgaaaactttcaataatttgaaagtattttgagcagaaaaatacatttgatccaagtatagaaagcgt

SEQ ID NO: 38 - DNA, 319 bp, Homo sapiens
actgaaaggatgaaaaggtggtgtcatgttttggggagaatcttacttctcaaatggaaattgcactttttgctgaatcctttgcatttttttggtagtaagcagttcattgagtatcaggtcctcaaaggaatgagttggcccggctagggtgggccctcttgacctaacttcagagggggccttggctcagtaggtgtgaatcagggaagccacattgtcctcagggtgctgtatgaagctgggtgtgggcggattcctcccacaccttcacactggcctgcctccaactcatacagatctcggagcggtcggtacc

SEQ ID NO: 39 - DNA, 592 bp, Homo sapiens
  misc_feature (1)...(592): n = A,T,C or G
acctacacttggaataagacactgttctgaatttgtgtcatagtttttttttcatattgacattaatagaggcttctattggggttaggctaaaaatcttttgtaaaaaattttaaatgacactgctgatttttctccgttaattatcagtttataagctaataaaaactttggcttgatattacattctagtggttaaatttgtcatagaaggaatatgtgctgagttacttatgtattgtaatcttgagattacgattttttatttgaaaattagacaaagtttgtttttaatttttatttcattttaataattgagttcagattaaatgggaaggctaaatttgaattccgtttttctctcaaaatactgnttttctattattttaaggcattccttggaggtctaaaattgggcatttataggtgttgatgaaagcacacccgatttaaagaatggatgaccccccttctgnatnaaacctttaatngaattttaaannccaaactttgggtcctttaaacctnggacctcctttcccnnaatccccttaaaaaaancntnggcnttngcanaattcnntttgcccaa

SEQ ID NO: 40 - DNA, 577 bp, Homo sapiens
  misc_feature (1)...(577): n = A,T,C or G
ggtacagaacctaaaggtttcactgaatgcgaaatgacgaaatctagccctttgaaaataacattgtttttagaagaggacaaatccttaaaagtaacatcagacccaaaggttgagcagaaaattgaagtgatacgtgaaattgagatgagtgtggatgatgatatcaatagttcgaaagtaattaatgacctcttcagtgatgtcctagaggaaggtgaactagatatggagaagagccaagaggagatggatcaagcattagcagaaagcagcgaagaacaggaagatgcactgaatatctcctcaatgtctttacttgcaccattggcacaaacagttggtgtggtaagtccagagagtttagtgnccacacctagactggaattgaaagacccagcagaagtgatgaaagtccaaaccnggaaaattccaagaactcgngtcctngactggatcttgggganaacccttggttnttaaaanngggacntttttnccggcttggggcccntttagatttcaaagtttcangaacccaaacggtccttnattaaanccggngattgttcgaagg

SEQ ID NO: 41 - DNA, 490 bp, Homo sapiens
ggtacacaagagtataggtatataaaactaaatgaagtcaatcatattgattatccccccaaaaaaaatataatctaaagaataatcagttcctaaataattgaaagctgcccttacaaaataaaacaaaagaacacacatttcgttgtgttgcccaggctggtctcgaactcctgggctcaagcagtcctcccacctcgacctcccaagatgctgggatttcgggacatgagccaccacgcccgggccaaagctgcctttttttaacatggattttttttcccccattcgttgtgctcagaagtcatttcctcttatttttctctgctaatgtgtgctttaacaaacctgtttaaaacgacaagcctttaatcaactggggtgttttgttttgtttttttcttattttcttaggagtcagtggatcggtggggaaaatgctgcttaccctgggccctgggctgtagaaagaagacaccaaaggcaaagt

SEQ ID NO: 42 - DNA, 571 bp, Homo sapiens
  misc_feature (1)...(571): n = A,T,C or G
ggtacttgccttttaactttcccccacattactgttgagtcatggaataatgtttaagttgttatttgcatggaaattaagtaggctgtttatttatctaaaggaatcaagtccactcttctgcctgcaacatttgttcaaaaactaaccaaggtaaaatatttatttgaaagcccaactttgatgttaaatattcttgaataaatctgttattttaagaatatcacattattcaatgcatataaaactatcagaagttagtaaatcataccagcactaaaaataagacaattggaatatattttagcatcagtttacaaacaactttattatcaacagaaattttagctcttttctttgcaagatatatcacagctgctttgggcagtagctgaagccgaagtatgaacagtccattttgtttcttaaaatttgaagtcgtgtctgtcgtagcatttttactaccagcagtatgttacttaaaaaactacatggctttccttgaatttatttgaccgnattatgtaatagacttgaaacaattgccatctttgtagntatgcctgggttc

SEQ ID NO: 43 - DNA, 708 bp, Homo sapiens
  misc_feature (1)...(708): n = A,T,C or G
aggtactgcaaaaatgaagtattattctctaagtattcattttatccctttcatttcagcaaaatcacacatttgaataaacaggatcgaaatacgacacttgtctttcctcttaatttaaggaatatattgtttagattattgttcatattagacaactgcctcaaaaatgttttaatgccatccaataaataaacttttgatagattatgactttttttaattttaagttgttaagaatattaactttgagtctcctattaatattctaaaagctaggattcaattcagcagtttcctataacattttagaacccaaggcataactacaaagatggcaattgtttcaagtctattacataatacccgtcaaataaattcaaggaaaagcccatgtagtttttaagtaaccatacctgctggtaagtaaaaaatgcttacgaccggaccacgactttcaaaatttttaaggaaaaccaaaaatnggacctnggtnccattaccttttgggnntttcaagcntaccttgggccccaaaagccaagcttggnggaatataatccttggccaaaggnaaaaaggaagccttaaaaantttccngggngggaanaantnaaaagttnggtttggnaaaaaccnggangcctaaaaaatttttatttncccaaattggggccctnaaatttttnaaagggcnngggganang

SEQ ID NO: 44 - DNA, 632 bp, Homo sapiens
  misc_feature (1)...(632): n = A,T,C or G
ggtactaggtctattaaatctacctgcttaaaaaggttttgaactgaagattccaggagctgagcagctgcctcttcaaaggttttgagagtaacaaattggacctggtagtttttgctaacagggtggaggccgttgatcatgccctcagtggtgatgatggccaggtatgcaccgcaggggctcactgctatcccgtgagtccttactgagccaaacacatctgagagtttaatcaactggtgttcaaacttcaatgcaacatctgtgaaaatgggaatcagctgcctcacctttccgtcactggagcaagtatagactgttccattctgtttgtctgcagtcatggagacaattggcagtgagttgaaggcctgtgacatgggaattgtgaaccattnagccctgctttggagatcagaagangacaccaaaattcataagancctcttgcagcccacttactaaagctgcnactacactttttggtaagggatgaataaangtggcccacatttngatactgngcacnagntaacttgggnccatttcttttccncaagannaccagggttgncttaaagnggaaatannctttnacngntttnaaaattncccnggaaaaatttttt

SEQ ID NO: 45 - DNA, 664 bp, Homo sapiens
ggtacccggtctacagtagagaggttttatgaaaataaaatacaagaccaaattcaaagagctttaaaaaccacagagccagacaaatgtgagaggttattatgagcaaacaatgacattacagaagtgaaagtgctcaagtgccatcaagaacaagggctctatttcactcccatgtgtcaccataataaagacagagtccctgatcttaaaggcatcaattttgccccactggaagccttaattgtaattcattaatacagcagcatcctaaaagttactgccgtttctaggaatccaaacaactggttttaggtcctaaagaatttgaatcattaagaaatttaaagtacccactctgggccagttgatggctgcgaagagagcagaaggggtgctgctgtaggaaatcaatggctcggaagaccacactgaggaaggtgtgagttgatactggaagatctccaggtttgaggcatcttcagaggtatatggtggttttgtgtgtgttgagggtgtggtagcgcagcagctccctagggaattagaaggttttattgaacatttaccctgtgacaggcactgcaggcattcagcgcgcagtgtcatcttcattttacaggtgaggaaaagactcaggttcaagtagatggtcaaggccagt

SEQ ID NO: 46 - DNA, 633 bp, Homo sapiens
  misc_feature (1)...(633): n = A,T,C or G
ggtacgtgtttatgggatgggcacactagatgagatggaagaagatgtgccagtgatgtggagacagggagtgtgggagaggagcaggtagagctcagagacggtgcacttaggcctgtggtcattgggggtgacccaagtagccagcagctgcccagcgttttgtgtttctctcctgggtccctaggagtggaatttgtgtaagaacaatgtgtgaggttgtggcctgcggggcagttagcagttgtcagaccggtgcctggaagtgtttcttggatcaggaaatcaggactgaaaggggcattaagtttgtctggaccaccctgtcattgtgcaatggggagatcgaggccttttgggaggaaaggccctgcttaagggccgtataattgaagtcagtggctgtgttggggcctttgaacctgccaaaagctggtgcctttctccactcctcagtgcttatgccccaagtgagggtctagnccagcctctcccactttcctcccactttcactaagcacctgctctggtaggcccagtgctgtatgctgtgaactcaggctggttaggtgctaatttattcacccagccagacattctagtgtctcctgcatggcaggcactgttcgaagt

SEQ ID NO: 47 - DNA, 433 bp, Homo sapiens
accagttgctcctccatgatggtctgggatcacagaggctccaagtggggacttcactacctagaccagtcccccacatggtccctccctgggctgcatctttgcctgtcttagtctcctgtgttccttgagaaagtggagtcaataacacctttctcttcaggttgtgggagaacggctcccagccaccttctgttttcccttctctttgagctctagattcagggaggggttaaggcaagaccaggtcccagaagcttggctgagaccagaagccagtgcttactgtgctactgccaccttcagcagcaagggccccaccaatcaggtccctagattcaggccccaggtggagctgccctcccgattctagggagcctctctacctgaaaggtgcacagaaaaacactgcagaaaactcacccagcaaggg

SEQ ID NO: 48 - DNA, 633 bp, Homo sapiens
  misc_feature (1)...(633): n = A,T,C or G
acttcttcaggtaacactgtaaggatctccagcaaaaaaggcaaagaagtcacatcattgctgtatttttccaccagtgtttgcacacatcccttccaggaaggcatctgtagggcaagatctgctattgctaaagccagctgcgttacaataacaggtgacaagtctttcaagttctggatatgggttagcaatgagtcccgtaaagaggcatgagagtctgtggggagctcataaaatgaggtctgaatcttcattttcatggtctgtgcagcaaaatagcatgactccacatcctgccggatctgtaacaactggtctgagatctcccatgcatgaaccgaacgctgcagcttcccaagcnaaaaagaggngccgctcctttcccgctgggatctggggtccgtggtaaanccgcctgcactggcttggtaccaccaataaaggncaatttncgaaaaaaaaanaaaaaaaaaaaccttggccgggaccacncttanggcgaaatcaacacactgcggccgtctanggatccactngnaccaacttggcgtancatggcnnactggttcctggggnaattgtanccgttcaaattccccaattacaacccgannctaaannaaactnggg

SEQ ID NO: 49 - DNA, 624 bp, Homo sapiens
  misc_feature (1)...(624): n = A,T,C or G
ggtacccctctctcacacatgtcaaatatgaagaggcagaaggagccaatggcaatgggtccgacttgcttccaataccctgcgatgtggttccgctcgtgctgatccatcatgtgctcgccacagaagatgatccagaaggacagaagcatcgcatagaagatgccctgtcggatgtcaccaaacagcagcatccaggtccagtcaaacccgatggaaaaccattccactgggatattgataaaggtcatggaaatcccaagggcaaagatgacttttttcagaagcaccgggggtcgggacatcatggtgatcctcctccaataccacaccataatgatgaagatgctgggccgtaaggaaggtcttcatggcaaaccacaccttggtgaagcctccattttggtggatccccaccaacccggatatcctttatctcccaattcccacattgatttcttcttcttattcacaggcagncggatgttnaaangnaaaacttatggccacagacccatttnatgaaaggaagacttacatcatagtacggccttatgcttggatcttggaanntgagggcattgagntccnggactgccggcgggcnttaaagngaatccacnn

SEQ ID NO: 50 - DNA, 733 bp, Homo sapiens
  misc_feature (1)...(733): n = A,T,C or G
ggtaccacaaagacagaagcttcacaggaagagcggtctaattcaagcggcctcacatctctcaagaaatcaccaaaggtctcatccaaggacactcgggaaatcaaaactgatttctcactttctattagtaattcgtcagatgtgagtgctaaagataagcatgctgaagacaatgagaagcgtttggcagccttggaagcgaggcaaaaagcaaaagaagtgcagaagaagctggtgcataatgctctggcaaatttggatggtcatccagaggataagccaacgcacatcatcttcggttctgacagtgaatgtgaaacagaggagacatcgactcaggagcagagccnntccaggagaggaatgggtgaaagaagtctatggggtaaaacatcaggggaaagctggttggatagcagtngatgatgaccnaaatctggantcttgnaagaatgaccggtnattanggntccaaaaatttaaacccttangttttgaaggggccnaaacttnggaccnnaaancttcattgggatttaaccaggtnggnacnttttgggcaccccattgacccgnatttcccccattgggaccttttcgaatttcttanaaaacttggnccnnggaaaaaagggaacccgggaaaaagggtaaaatggaaaaggaaaaacctggnttngggaaaaaaaaaacntttgcccaaanaaaaaaaangaaaagcccctttttt

SEQ ID NO: 51 - DNA, 565 bp, Homo sapiens
  misc_feature (1)...(565): n = A,T,C or G
acattaagtcaagattgagctttgatttaaaaggaacataaatcctttacattataaagggaagacataaatctctccaatctaaattttctcatcttggatgatgtcattaaactgcagctcaaactgagattagtttagaattttatgtaaattacatctttgaacaaatgagaacaaataactcatctgcagaatatataaagaaccttcattaatcaaaaggaattagacaagcacctagttttaaaaaataaatggtgaataatttaaacagaaacctcaaaaaagaaaatatcagagtggccaataagcacatagaaagatacacaacatcattagtttttaagagaactacaaattaaagcaaccataaagatacctccccaacactacnagaatgactaaatttttaaagtccgacagcgttgtgcccggtgtcccaataccactcaggttaagtgatttctggaanggctccagaactcagaaaagctatacttgctatcctannggtatgggttggtacngtggaaaaatcccggttaaatcaggtaaagacccn

SEQ ID NO: 52 - DNA, 637 bp, Homo sapiens
  misc_feature (1)...(637): n = A,T,C or G
ggtacgttccaaagaaccaactggttcttgatctgctcctgagagataaccttcaaatccttgaaatatcctgcatgataagagtgagtttgtaaatgtggggccttcgatcatgccaaatagtttatgctaaccatgtgatttatggtggggaacttgaccatgctgtcagtttgacatccggaggggccgagtgttaagtaactaaggttggccacatgggcaatccatgcttctgtaactgaagcctaatagaatctctagacaacgaacagcttgggtgagcttccctgcttgataatattccacattgntttctggaagaattgaacattctttacacagcttcactaggagcagacaactggaaatttgcctgnggnctctctttgggagaactctgggncttttacctggatttaaccnggatctcttnactgnaaccaaccnttaccnttagtatngccaaggataacttttttgaagtctgggagtccttccgaaaatncttaacctgatggnnttggganccccggcaancttgnggcctttaaaattanncntnttgnanggtgggggggntttaagggggtttaattngagtncttaaaactaagnggggggggntttttttggn

SEQ ID NO: 53 - DNA, 632 bp, Homo sapiens
  misc_feature (1)...(632): n = A,T,C or G
ggtacatccaagatttgaagaactgaaataaatcagctttaaacctgctttttaaaaatatctgggttggaatttgcccctgacaaataataaaatgatgagtgatgcaagtgacatgttggctgcagcgttggagcagatggatggtatcatagcaggttctaaggctctggaatattccaatgggatttttgattgccaatctcccacctctccattcatgggaagtttgcgagctctgcaccttgtggaagacctgcgtggattgttagagatgatggaaacagatgagaaagaaggcttgagatgccagatcccagattcaacagcagaaacgcttgttgaatggcttcagagtcaaatgacaaatgggacacctaccagggaaccggagatgtgtatcaagaaaggctggcacgtttagaaaatgataaagaatccctcggtcttcanggtaagtgtgntaacagaccagtggangctnanggagagaaaatcnagaattggagtttggcttgaaaacccngagagaattgaatgccccgaagaatgctgcacaggagctntaattggacttcttaaactcnaanttggactgangctgaaanttacctgagttgactgnnntggtn

SEQ ID NO: 54 - DNA, 661 bp, Homo sapiens
acaatagaactttcagaaaattctttacttccagcttcttctatgttgactggcacacaaagtaaggctgttgctttcaatgcatgcaatattaactttgagtgtttactaactctgtgttttgcttacctggcttttcttccttgaagttgcttaattttttttcctccaagaggaattatttaaaaagacttttgtctgtgacataaccaagatttattctgtttacctaaggaacttattttcttttttgcaatttcatttattctgagtcactttatttgtaataagtgaagaattttaatacttagaaataagttgtaaagaaaataatgagaatcttaccatgctttagaggaacggtaatttctagaaatagttaaaagatgaaatactaagatattattttaccttctttatatagctgtatatactggtagtatgaaagcaactagtgtcattgatgattttttgggggggtatttttgtattctaggcttgctgcaacctcatttagagagggttgccatcgatgctctacaggttatggtggttggtacttcccccaccaaatcgtagaaagcttcaacttttaatgcgtatgatttcccgaatgagtcaaaatgttgatatgcccaaacttcatgatgcaatgggtacc

SEQ ID NO: 55 - DNA, 628 bp, Homo sapiens
  misc_feature (1)...(628): n = A,T,C or G
acaactgcctacattctttctgtttatcacttcagttagaagtgttacattcccaaactctaatgttaatccgagaacggtggggagaccttgtgcaggtggaaaggtatcatgctggaaagtgcctctccctttcagtttggaatcaacaggttcttgggagaaaaactggaacagcatctgttcacaaagttacaattaaaattgatgagaatgatgtctccaagcctttacagatttttcacgatcctcctttgccagcttctgattccaaattagtagaaagagccatgaagatcgaccacttatcaatagaaaaactcctgattgacagtgccatgcaagagctcatcagaagcttcaagaactgaaggccattcttagaggcttcaatgccnatgaaaactctttcatagagactggctccagctcttggtggtnccatcttggagccctgnggnaattcanantggctgccattttgnagaattacattcttggaaggntcaatggagctttatngacttgncaggccctntgggtgaatgggaanctnggatgagatttgaaccaatntacccggattancacttaagtttgnttggcaaaangttcaggcgnntnaaaa

SEQ ID NO: 56 - DNA, 635 bp, Homo sapiens
  misc_feature (1)...(635): n = A,T,C or G
acctcagctggggaaccgtcctagaaagagatggccactatgctgtagctgccaaatgctatttaggggccacttgtgcttatgatgcagccaaagttttggccaaaaagggggatgcggcatcacttagaacggctgcagagttggctgccatcgtaggagaggatgagttgtctgcttccctggctctcagatgtgcccaagagctgcttctggccaacaactgggtgggagcccaggaagccctgcagctgcatgaaagtctacagggtcagagattggtgttttgccttctggagctactgtccaggcatctggaggaaaagcagctttcagagggcaaaagctcctcctcttaccacacttggaacacgggcaccgaagggtcnttcgtggaaagggtgactgcaatgtggaaagaacatcttcagcccttgacacccctgaccgtattanggaanccttnanaaacttgagaacattnagtaccttgggccggaacacccttanggcgaattccacncactgggggccgtactanggggntccaacttgggcccancttgggggaanatnggcnaacnggttccttgggaaatgttacccttccaatcccncaanttnaaccggaggnn

SEQ ID NO: 57 - DNA, 345 bp, Homo sapiens
actgcttggatcctgctctctccaagctgtgcacacacataaggcagatgatgaccatttgaaagatgagaaggtccgggaggaaagcatatccactctcatactcctcctcatcctcactggccaggctgaggttgggtgaggagggcaggtagaagaggcagaggttgaagtcctccaggactgactggcaaagtgaggtcagctctgagtccacggagctgcttttgggctgtaggaggctttgcagatacataaagttcactagcaaccttttaatgtctttacatcgctttttgccaggagacagtttccgagtctcacacttcttcagttggtggtacc

SEQ ID NO: 58 - DNA, 638 bp, Homo sapiens
ggtacttcctcttcctcctcatcctcactagaggcttcttctgcggcatgattagaccttgggggaggagcagtggcagtgccatctgccttctggatcgatggcttctgacagatgtatttggggtcccttccaagattacagatttcttcaagtaacttgatgatggcagtcgttgcatctgttttaagggtgggctgatgtctcatgagctcatcgacagcactccccaggttggatgcagtatccccaaggggatcagaacttctcctcctccgcatggctgggaggtaatctggagacagaagaactttgaagaggcgttcaaaaggctgacactgaacaaaagactgaagacctcgggcattcaaacagagtgcactgaatacatttgggagggagccaaggacttcacgggtagcaggaacatctttgataaagcagtgcatgcagcatgacatctggcaatccattgtcctggagtgaggagagcagtgatggttcttgaaatacaaacacagtcaccacttcagtagctaggaggaagagtgatgggccacagtattctgcattgctgatgatgtgtttcagggaggtaggcagagaaccatccatcacatgtcgtatgccatctgaga

SEQ ID NO: 59 - DNA, 728 bp, Homo sapiens
  misc_feature (1)...(728): n = A,T,C or G
gcgtggtcggcggccgaggtaccatgcccagctaatttttttacttttagtagtgacgggtctcactgtattgcctaggcttctcaaacttctggactcaagcaatatgcctgcctccgcctcccaaagtcctgggattacaggcatgagctaccgagctcagttttgaaaggtagaagtgtatgctacaagggatgtaggacttgagagtcaaggcctatggtcttgtcctggctctaccagtaagtgtgaccttcgatgtttttttctcaagtaaggctggtaataattaccacagttgtgagaattgagaatttggaaatgcagtgaaagagactatactcaagtcttgttctggactaacagtgatcttaaaatctctcatttcaaagaaataaagtattttgatgatctcttgcatgggngtattaataaaccttggnataatggcagaaactgtacctacaacagggttaccgttaactctttttggaaggtggtttggaaaaanaaggaatggacccttgaatcttggaagaacgttcaancctcatgacntaaggaaaaanttggaaaagggccattggngancccaaggacccaatgcccntgctcttnaaaagggaaaagggggaccangggntcaaaattggaaaaaccgtttttccnggaaatcctttgggccccnttnnaaaggtccccaccttnggggaattttgaaaaaaaaa

SEQ ID NO: 60 - DNA, 581 bp, Homo sapiens
  misc_feature (1)...(581): n = A,T,C or G
ggtactggcccaaggcaaagatggagaatatgaagagctgctcaattccagttccatctcctctttgctggatgcacagggtttcagtgatctggagaaaagtccatcacccactccagtaatgggatctcccagttgtgacccatttaacacaagtgttcccgaagagttccatactaccatcttgcaagtttccatcccttcattattgccagcaactgtaaacatggaaacttctgaaaaatcaaagttgactcctaagccagagacttcatttgaagaaaatgatggaaacataatccttggtgccactgttgatacccaactgtgtgataaacttttaacttcaagtctgcagaagtccagcagcctgggcaatctgaagaaagagacgtctgatggggaaaaggaaactattcagaagacttcagaggacagagctccggcagaaagcaggccatttggggacccttccttccaggcccccaaggcaggacacctcatggatgacaaccccttcgnactcgaaaagtcagactttcttttggcccgggcttttttaaaatccaaagttacnagag

SEQ ID NO: 61 - DNA, 681 bp, Homo sapiens
  misc_feature (1)...(681): n = A,T,C or G
acgagcccaagccctgttccatcagccaattgcaaacctgctccttggtccacttggcaaatggcatatccaagtcactgttagactgtcccaagtctcgagaccaacctaatcggggccccgcggttgcccttgtccctcctcttttgaattcaggctcagacatgtcatctgggttgaatgtagttgattgacttctcctaagttttccaaagagtttcatgatacctctggatttctttttggaatctggagatggaggcggtatctggaagggactgttcctctgtgaatcttttggccgagaaagaagcaccagccagatctaggtgctctgctgnctctttttctgnttcaactaaatttggtgcacttgctggtctcttggtacttttgattttaaaaaagccccngccaaagggaanactgacttttcgagtgccnaaagggttgcatccatngangtgtcctgcccttggggcctgggaagnaaggtccaaatgggctggtttctggccgancttttggcctttggannccttctggaaaagttnccnttttcccattaaacgntntttcttnaaaatggcccagctggttggacntttggnaacttgaagttnaaagnttttcccccanttgggnnttaacagggggncccagggatatgttnccttantt

SEQ ID NO: 62 - DNA, 569 bp, Homo sapiens
  misc_feature (1)...(569): n = A,T,C or G
actgggattacaggcgtgacccaccacacccggcccctaaccactcttgaaagtcccttcacatctgttagttctttaaggatgaaggctgagaattaaccttgttccctattccccgaagtgtctgacccagtgctgaatgtgtggtcggagcttggtgaattctttccaaataaaggaattcccacaacagccccacgaaggacttgaggcaaggattaggatccccacttacagaagaggaggacaaggcccagagaagatcccccagactcagccagggcacgaggggtcgggtgagttttgagatcgatagagccttctttcactctcctgtgacgacatgacagtagataaaaagcatataccttcatgcactctcatgggctctggcaccatgtttagagtcgggctagggttctttgcaatctggtaacctatggcttaaacttatacccaaacctctcttcctgcttcttgnctgtgcacatctctttccatcagaccatccatagctcaagctcaacagctttnccagctagtgntcctnctccttttncatggagtgc

SEQ ID NO: 63 - DNA, 650 bp, Homo sapiens
  misc_feature (1)...(650): n = A,T,C or G
gaggtacaatggaggtatctgtgggaaggaaaatgcaggtaaagatgaagaggaaaatctgccttgttaaagcccagctccccaaagtattagacacatgaatttgcttctgtgctgaggccatctgtggccgtcaggctagctgttttctggctgatactttttgggaatgttattgttgctgagaaagatagttccatgtcagagctatcaacagaatgtggccatctggacaaccatgtataaaccaacttattgcttcttgaatgccacctacaaacatgactacctgtcctttcttgtttgaaggggcactaacaatacttgggaagatggaaagtgaactggacattaaggcagagatgaagaattctgccttgcttcctgcactccatggaaaaaggaggaggacactanctgggaaaagctgttgaaccttgaactatggatggnctgatggaaaaaggatgtcncngaccanaacnngaaaaaaaggtttggtttaagttaancctnaggtacccgaatgcaagaacctaccccactttaacatgggcccaanccttaaaagcctnaagntatgnctttattcnggattntncccgaaangnaaaagntttttgantnaaaattncccnccccnggccggg

SEQ ID NO: 64 - DNA, 676 bp, Homo sapiens
  misc_feature (1)...(676): n = A,T,C or G
cgaggtgccaattgggaggaaccttctttggatgagggtgctcggtttagcaatatcaaggtgtggctccagataattcaatcatctaattaagattccagttatgctaatctgttttaaaattccgtttgtgtaaattcttttacaaagcctcaaccccaatttccagggagggttcagagcctcaggttgagttgatgaccaacagcctatagtttaacccatcatgcctctagagtgaggtctccaaaaaaatccaaaaggaatagctgtagagagcttctggataacactaactggaaggtagagcgccactccaaacaagacgggaccaaaaatttttctgaatttttcgcaatatctgcaacaataaaatgggaaatgtaatggccctcctacgtgttgggagctctttcagccaatggatgcnactattacnaggantggtggaaacctggattataaccagctgctgaaaaagccagtaaacaacgtaaggctttcattggtaatantattggaaggacagtcntgtgggacttcggccctttgnaactaatggtatgccccgnanataaccgtncccttggatttcaagaccccctttggttggnanaatttttgggcatttgcttgctggcttaattaccattggaatcaaatcttttccggccnn

SEQ ID NO: 65 - DNA, 660 bp, Homo sapiens
  misc_feature (1)...(660): n = A,T,C or G
acgtggcctgaagagatgttattctttaaaatggtctcggctgtgggcgaggtgcccccatacaacaactctcgggctatcatggcagttaccgtggccttggcaggattcggagctgccctggtaaaatctttggtgtgatgtccttgactaactcctacagcctgggcgacctcgggcaccatgggaagaattccagcaggcagctgctgatgacttagataaggcatcctgaactcatcctctttattactagtcccattttcatccccagagccaggttcaaaaaaggttacttttcttccatcccctggtttctttatgggtgtcttctcctctgacttgagtgccggtttggtggctgcgcctgcgggactttgaaacccaggatcttcaacatgntctcgctgcattgccttggccaccttcttgtggtgcccgtccttntgcaatgggggttctaaccttnacctgnatnacaaacttccttncgcnccggaaggctngcttcntgaagaacgtgtaccttgggcgngaacacgcttanggcgaantccacncactgggnggccgtactannggaatccaacttcggaccaacntggggnaacatggcaaactggttcctngggnaaatgtatccgttacaattcccncana

SEQ ID NO: 66 - DNA, 678 bp, Homo sapiens
  misc_feature (1)...(678): n = A,T,C or G
actcaaatctcatcagcagcgtctacatcgtaaaaaacaattagagaatgaaatgatgcgggttggattatctcaagatgcccaggatcaaatgagaaagatgctttgccaaaaagaatctaattacatccgtcttaaaagggctaaaatggacaagtctatgtttgtgaagataaagacactaggaataggagcatttggtgaagtctgtctagcaagaaaagtagatactaaggctttgtatgcaacaaaaactcttcgaaagaaagatgttcttcttcgaaatcaagtcgctcatgttaaggctgagagagatatcctggctgaagctgacaatgaatgggtagttcgtctatattattcattccaagataagggccatttatccttgtaatggctacattcctnggggtgatatgaagagcccattaattanaatgggcatcttttccagaaaggctngcaccaatctaccttagccagaacttacctgngccngttgaaagtggtccttaaaatggggtttaattcttagagatttttaacctggataatatttgantggaccgngaagggccttattaaaatggcttgctttggccttngactgcttnanatggccccccaatctaagtncctgggccggaaccccttangggcnaattcagcncactgggg

SEQ ID NO: 67 - DNA, 695 bp, Homo sapiens
ggtactatgtgtgaagaaatggagaaaaggaaaaatcagtgtagaaaaataaaaaaagcaagagtgaggttggtgcctacagttcacagcatgtgataaggactgagcatttattctattatttggtcataaaaatgcaggctgtaagggcctacacacaccagcttatcgcagacttggctctgagctttcctgcagccaatacaaacagggagacacaacagagaattgccaatgctggaagctagatgtctaatgctgatcctgcttgtgactaaagtctgaatctgggctaagtcacacatgtcctgacactctggaagctctgtctggtgggtctgggaacgggggagaagtgaaagaggaagtagcaaggaaagatgcagaggcggagcctgggagctagggcagtgccaggtgggactgacatggcaccaggagtccctcctgcagggatctgtcctgattcaggtcagctgcatcctgcatctctagggaatgagaccacatctgcaactcaccaggactgttcactgttttttccaccccccaatctcactcccactcaatcccttggatgtgggaaggagaaatacttaagctgaatgttgctgtggcccatttgatgacaggttaccagtgtgggggatgacccccaatgactgcaagaagtggtccagatgtcagaagtgggt

SEQ ID NO: 68 - DNA, 579 bp, Homo sapiens
  misc_feature (1)...(579): n = A,T,C or G
ggtaccaaggaagacattcagagtgtgatgactgagatccgcaggtcccttggagaggtatgttttactttagtaaatgttagtttatatggtaatttttcctttaggaaaatctgactttttatagtgatttgcttacattatttacacttctgagttagattttgtttgaacaaaatgttctgtgtttattaaaaaaaaaaaaaaaaaaagaagcagtagcttgtaaaattctgctttagcctgtattctgaaggaagaatgccttagagtaagtctgacttcagaatatttatgcagtaaaactgacagtattcttcatcctaacaaccttatggtagaatagaaagaacagtggactaattatcaggagacctgacaattagttctagtcattgttgtgtcgacagttagctggaggaccttgaatataagttcctcaacctaacttgacatcagtgnttttcacctataaaataaattaaaataggtaatgattaaatactcttaaggctcttatattangnaatggactgggattgagtaataaatacctaatagcccttcagttaattnaaa

SEQ ID NO: 69 - DNA, 661 bp, Homo sapiens
  misc_feature (1)...(661): n = A,T,C or G
cgaggtacaagctttttttttttttttttttttttttcagaatgctaaattctatttttgtagagcagagactccattaaaaactcccaaatgacaaactagaaaaaaaatttacaacactgtgtgaaaatcanagtgtgattttccttaatatacaaagagctcttgcaaaccaacaagaaaaacacaaatacccaaatggaaaaatcaacaaaggacaggaatagttagttttcagaaaaagaaatatgaattaccaataagtgtgaaaatggtgctcaatgccatcatgattaaagaaatgtaaccaaaacagtggtgagcccatttttcatgtggcagattactcaattttagtaatttattctgaaaacaatctcccacaagtgtatacttccacttgnatgcncaaggaagtacaagcttttttttttttttntttttttttttccttggctgnagtcatgagccttttgaaaaaggcctccaaagtaaatntttcagggggaatagggaaagtntttttttaaanaaggcngtgattntaanttccccgggactatggtgaaatactntggaaaaattnaantggtccatggtggccnaaatggngctntttaaaanggnggggaaaaaantttttgngggaaaatncccaagg

SEQ ID NO: 70 - DNA, 697 bp, Homo sapiens
  misc_feature (1)...(697): n = A,T,C or G
actgagtttccagaaagcgcagtgcacttttagtgcgccaaactggtaatttgccatttagagaattcttcctaaagtagattatttctgttaaagcaaatcactattcctaactgatttataattttggtaaatctaaattttcatgaaataggcttataaagcgtgccacatttctgttttctcctatggacaggaagaaaaagttggatggggacagaaggacagaacagggtgcggaaaccataggataaaagctgtgggttttcccccaaaagttgctcaaaagaataatatgacttctgcttttcttctcctctgggtggcaattggggaatccagcagcctgttgagaggacagaattggttaagttgtggagaggtgcagtctaattggtaaatctttaaaagtcttggttgtctaacctgctggttttcttgctcacagcccctgcagatatcttctcacctaccttaacgctggcatgcaaggnttttctctttgctgagtggcatttnggttaatttccatgttnaattctaaccttggccatgattacnaagcccctactatgggcttgctttgagttangccctggggctttaagnaatncctanaattcncccnttcttnattcttaagggcttgganatnccaaaatgatngancttgacnttggtttgggagggnaactna

SEQ ID NO: 71 - DNA, 705 bp, Homo sapiens
  misc_feature (1)...(705): n = A,T,C or G
accacacagtcaatgatgtcagccactccgagctttagggtcctgggagtggcagtaggtgatagctctgtctctccaaaaagcaaaaggatcctgcttggggacaccccaaggtgggtggccatgtggtccaccacactctgcaggggctccgacatcctgaggggcaatctgaccaggtcagcccggcaacggattttgagtgggaagaggcttcctagatgacgggtgatgaagcccaatcttccaggtggagaggacagcatgaccaaaggaaggacgtggaggtgacatggcatgtgcagggaactacactgaacactgcagagagccactggcaggacccaggccagggagcacctacttggtcatactggggagcttggcctttctcttggtggtctggagatcccaaaagaatttatgccaaaaagttagaggtggatagattttaaatactggggtttttaaatacccganggattttaaatactcttgatgggttaatctaaatttanggggaaccaaaactggaggcnnntnaaaaggncccttataagtggaaaaantgaaaagagnttgnattanggcnncnnaaatttntggtggcnttttaagtnccnttngatttcccannaaaattnaatcngggggattttaatcccggaattgggggaanaaannnnggaagggttnccaattttg

SEQ ID NO: 72 - DNA, 683 bp, Homo sapiens
  misc_feature (1)...(683): n = A,T,C or G
actgaatgaagtaaccgaagacaacttaatagacctggggccagggtctccagcccgtggtgagcccaatggtggggaacacagcgcccccatcttccctctcctcccagcttgcaggcttagacttggggacagagagcgtcagtggcaccctcagttcactccagcaatgtaatccccgtgacggctttgacatgtttgcccagacgagaggaaactccttggctgagcagcgcaagacggtaacctatgaggatcctcaggctgtcggaggacttgcttctgcactagacaatcgaaaacagagttcagaaggggtaggtctttaaccctgtttttctgcctggagtcttctggagggaaagtcaggtggtttggcaaaactggctgggtaattcagcagaaactggcttgcacagggggcanggacaccctggggggaaaaaccnacgggggacaccccgtggaacccaagtantgccttatttgagtcttnacctnaccccgtgagataaggcccccatgagctttccaatccacccaagagaaacnagtncagcnggtggganacagcttgnacncccanaagcnnacngaagccgggttccaatctnggataagggcntttccaaancctggtggtcttaccaaagggcccaattttcaggccaanttttntggnn

SEQ ID NO: 73 - DNA, 566 bp, Homo sapiens
  misc_feature (1)...(566): n = A,T,C or G
acagtgtggaaatttcaacatgtatatacatccgtgaaaccattatcccaatcaacatcatgaatttaaccatcaccccaaaaagtcttctcatgatcttttgtaataccttcctctttcctgtcccgtcccccacaaccgtctgttttttgttctattagtttgcattttctagagttttatataaatgaaatcaatacattataccttttttgtctagcttctttcactcagcataattaatgtgagagctgtccatgttgtctaatgtattagtagtccatttctatttttgtggggttgggcaggggctgggtagtattccattaagaggatacactacagtttgtttattcattttcctattcatggatgttttggttgtttctggtttgaggcctataatgtcacttgaagatagattgtgatgttaaaggtgcatactgtaaaccctaaaatagtcactaaaataacnaaaacgaaaaggtattggtaataagccaacaaaggaaataaatcaaatcataaaatacnaaagaaagcngaaaaagaccaagggcacctgg

SEQ ID NO: 74 - DNA, 690 bp, Homo sapiens
  misc_feature (1)...(690): n = A,T,C or G
cgaggtgtacaagcttttttttttttttttttttttttttggctccctgtagcctcgacttcccagcaatcctcctgcttcgcctcacagcaggcacacgccaccatgcccagctaatttttgtattttttgtagagacagggttttgccatgttgcctaggctggtctcaaactcctgggctcaagcaacccatctgccttggccaaccaaagtgctgggattctaggtgtgaaccactgtgcccagccaatctctgtcttttaaatgagggtgtctgcatcgtttgtttcacatggntatttaggactaactctatcattctgctgctcagtaattttgtttgccaggctgcctttggtctttttctgctttcttttgnattttatgatttgattttatttcctttgntggcttattaacaataacttttcgttttggtaatttaagngactattttaggggttacagtatgcaccnttaacatcacaatctatcttcaagtgacattatangnctnaaaccngaaaccacccaaacatcntgaatnggaaaatgaataaccaactnnannggaancncttaaaggaaactaccaaccctggccaanccccaaaatngaaaggcctctaatccnttnacacntgggccggtttncataatntcntggngaaaaactttcccaaaaggn

SEQ ID NO: 75 - DNA, 447 bp, Homo sapiens
ggtacaaactgtgttattcacatctggcccccaaggtatgtaagggaaaactttaaataaatctttaagctcatcaggtgacaaagcacagtctctatccaaatcatgcttgtcaaaggtgctttggagaaataaatatgcatgatgatttaattcagtagtgcaatcaggaggtattttcagcagggggaacaaatattcaggtgtcaaatccaggtcatcatcataaccaaatcgtcgaagcacagtccaagtagtttcgtgtctccctctctggataaaaagtgtgtgtaaaaagagaaaacctttcagggtcaacccactgtcagccacaccatcacttatatgttttctgactacattcttgacatcctccagagcttgaggagctaatggagtgttgaaacaaatcctctgaaagaagttgagttcagcatcattgagagt

SEQ ID NO: 76 - DNA, 674 bp, Homo sapiens
  misc_feature (1)...(674): n = A,T,C or G
actgttaggtaattttgatattttacttagttggtttcttttgtttttggagacagggtcttgctctgtagcccaggctggactgcactggaactcctgggctcaagcaatcctcctgcctcggcctccaagtagctgggactactacaggcactcaccaccattcctggctaatttttagtttagttttgtagaaagtaagactaaatacactggatcattcagaatgtcagaaagtaatgttttcctcagtttattttttcttaatagcacacaccatgttattggtttgtgttttgttagtgcttgtaactagagtgcaacttaattaacaatttgctcctcctcatgaggttcatggcagtatagacttaaattctagtcccatgtttgncatttattagctgtgtgctaagacttggttttcctatcagcagaattgctatgtatatctaagggtatgttaagggttcaaaccaggaaccctctttgtaagtgaaaggtgggggggagctattggtaaattttttggtcagaaattggcatacctaatttaattactaccttactaaangnatcaattaccctcatctatttcannggtttaatgggnccaagtggaatattcctttacttaaaagccagttttactgggaaatcncttancaaggntt

SEQ ID NO: 77 - DNA, 441 bp, Homo sapiens
acatggtcttttgttccctaaaagactgcatcacacctctgattgggaggccaactgtcatttaactgagtgtttgagtgtctaaaaccaagttcagcatttgtctatctagcaagcttccctttccaacttgcttactcctctcaatttcatctgcagatctcctggttcaataaggctcaaaaactggctgttcccttgcattcctctctcttctcccaggcactcttcatccttttttctctcaggctcacccttacaatccaacaccttccaatggcctctcctagtccagtccatcctgacaccaagtaactggcccgctttggaagtcctgacactttcagtccctctttcctgttctttccactttcctcggcccccaggaggatcctggatggtcgtcacagctgacaaatgatgagcagaatgccctgtacc

SEQ ID NO: 78 - DNA, 623 bp, Homo sapiens
  misc_feature (1)...(623): n = A,T,C or G
ggtacacgattaacttaacacaaaaacccgaacttcaaaatgaaggtgtgtggaggaaaggtgctgctgggtctccctacaactgttcatttctttgtggggcagggggtagttcctgaatggctgtggtccaatgactaatgtaaaacaaaaacagaaacaaaaaaaacaaggaactgtcatttccacgaaagcacagcggcagtgattctagcaggcctcagggccctgggcctggagaggctacatgagggggagcctcagtcacaggatcaacctggggcccgaaggagcagggttccctgcctctccctctgcaacagatcatcccatccaacacaacccccaaaatgttgatgatgacgcacatggtcaaccctcaagacctttaagacaaaacagagcacataggaaaaaaaaaacnaaacgcccaatttctgctgtgtcaatggtagggcaccattttaaaaagtctgctaaacagtctgctttacttgganggacgtatgcaaacataatncttgttagtgaagaaccatgacgcctctacttactctaagttagtngacantaaacttctgctcccttcaagttaaagncnttcnaactgggtggggaatact

SEQ ID NO: 79 - DNA, 462 bp, Homo sapiens
accagttaaaaatgtatttaccaataagtgataacagcaacaatagctaactgacaattgattaaagacagtatacagggatccttttgtggttcataagcatgatgattagattttcatgctattgggtgagatatgccttcctcagactttgttacagcataggcacattacaacctgtctgataggagaaagaaagtaaagatggtatacaggccaggtgcggtggctcacgcctgtaatcccagcactgtgggaggctgaggtgggtggattgctttaggcctggagttcaagaccagcctggcccacatggcaaaaccccatctctactaaaatacaaaaaaatggttgtggtggcacacacctgtatttcccgttgcttgggaggctaaggcacaagaatctcttgaaccaggaggtggaggttgcagtgagccaatatcgcaccactgtacctcg

SEQ ID NO: 80 - DNA, 640 bp, Homo sapiens
  misc_feature (1)...(640): n = A,T,C or G
acccgttgctgctgccatgtgtgtgcttaaaacagggttcctttttgtagcatcagaatttggaaaccattacttatatcaaattgcacatcttggagatgatgatgaagaacctgagttttcatcagccatgcctctggaagaaggagacacattcttttttcagccaagaccacttaaaaaccttgtgctggttgatgagttggacagcctctctcccattctgttttgccagatagctgatctggccaatgaagatactccacagttgtatgtggcctgtggtaggggaccccgatcatctctgagagtcctaagacatggacttgaggtgtcagaaaatggctggttctgagctacctggtaaccccaacgctgtctggacagtgcgtnacacattgaaaaatgaatttgatgcctacatcattgngtctttcgtgaatgccacctaatggtggnccattggagaaactgtnaaaaaagtgactgactctggggtnctngggancacccngaacttngcctgntncttattaggagatgatncntggngcaaggctttccaanngnattnggacaatccaacctaccaganaagtcatggntggaanaaccctggaaagaaacaatggtgaagggg

SEQ ID NO: 81 - DNA, 643 bp, Homo sapiens
  misc_feature (1)...(643): n = A,T,C or G
actgccattccttaaattcatttagattacagtgtgtaatcataacttttgatccatcagctccctttgtcaaacactggtcatactgcatgagttgatttgcttcattgattctgaaaagctgattccctcccatcctgtggcagggtcctagttcaacaaagcctccatttgtttttcccatgctatcaatgcagtaagcagtttcgaagcctctgatttctccccagtcaacatttttgggtggcaaagggtagtgtgaggtgatatcataagctatttcttccatgaaccacttaaaacttttgcagttgtgatcttctcgaaattttttcaagctccgatatatccccatatggtaatgcctgcgattcaggacgactagcatagaagtagtctttatattcatccaccaaaccttcacaactctaacataattcttcagagttggagaagacccaacataaatgggcngaggattncttggcagccctcaagacggtagatatgtccacacgagaaccanggaccaaataataatttgncaccacacttggcatatcttggatgagatctcaaagtttcaccaccccaaatttggaaacctggatcttgagacccaattcaaagaaaacttttgttn

SEQ ID NO: 82 - DNA, 642 bp, Homo sapiens
accaagtcattatttctgacagcattgtgtattagaaggaacactggatttagtcaaaagataggagtttgaatcccgatgccacctcttaccaactgggtaaccttggataggaattgcataacttctctgagcctgttctcaaattgcctacctcataaggttgctgtgaagaataaatgcatgatggtttctgaagcacttatcccctgccgttagatctcctgagctgcatttctgtttaacacgggcccccagtttgtcagccaagcagctcaaatatatgaagtctaaaatgaaagtaatgaccctttatgatctctttctattgttctcaatcagttcctttttttttagttacctaattctgctcacggtgtgtccctgttgttcagattccagatgtcagtgattgtggactcctcctttttcttaacagattacataatacctgcagctgccaagtctttgtctgtgttttcattatttcatcatttacatcagatctttcttttctcttcccgttgacacaccctagttcaggcctcattcaagtcatacccagagtattgtatcagcctcctaattgatctttactccttcactttgcaacctattctgtatgccttgtgaagtacctcg

SEQ ID NO: 83 - DNA, 584 bp, Homo sapiens
  misc_feature (1)...(584): n = A,T,C or G
ggtacagtagagtctgagaactgggtcaacactgaagcattcacaccttcaggatatgaagcagagcttcctgtcacatctgcagatgttgtgctgttggtcaagagccagtgtgcagtgatctctccacctctcatgggtgcgactgacctagacacagtctcagtctgagacatgggacttccattttgcacctcagagctgctggcaagctgatgttctccaaaggttggggaatcattttgccaacgcaaagacgtaagtccaaattcattttctgtggatggttcaatgaattcctcatcccctggattcccagttactctactgnttcttctcgattccactgcagagggtgaaagaaggactgaggatgaagtccgtagcaattctggagtccttggggaagccttctgtcttgctcacaggttccagactgacccgtcaaagatccgcagcgttctcgggccaccttcagtgaacacgggggcaacatgcattggctttgttgactgactnaggagctttggaggcccagtngganttgttaagcttctctgnacctgccccgggcggccncccgg

SEQ ID NO: 84 - DNA, 558 bp, Homo sapiens
ggtaaagaaagaaaaaaaaaaaaggcctggatactgcttttgctgtctctgttatgagatggaagacttacatggtttgtgataaaaggggaccatgagaatgaattggcttggcttactttccccctgaaatcctctctcctgcagactgtcttgaagacctggtgactggtaaataaagccctgcatggaggctgcacagcaggggcaagaggcccatcccccagcatctcactgaggacagcttcaggctgccttcctctgaacgtggtccacaccttcctctcctccacagagagggtgccgccagaatcccctgtcgctttctgtgtctgcaatggggggcagcacagggatcaaagccatctaaagagtttccagagaaagtattaattcagaacaagccaaagaccctgagcctcaccacaaacaggccttttggagtgtgaatttgagttgaagatacaagatcggagaatgattttctggtcttaactaatcctcgtcttcatgtttgatctttaagaagtcatcacccattgatttcagttttgctgt

SEQ ID NO: 85 - DNA, 499 bp, Homo sapiens
acaaaaccatcgccatcaaaaaaacgctgttctgacaacactgaagtagaagtttctaacttggaaaataaacaaccagttgagtcgacatctgcaaaatcttgttctccaagtcctgtgtctcctcaggtgcagccacaagcagcagataccaccagtgattctgttgctgtcccggcatcactgctgggcatgaggagagggctgaactcaagattggaagcaactgcagcctcctcagttaaaacacgtatgcaaaaacttgcagagcaacggcgccgttgggataatgatgatatgacagatgacattcctgaaagctcactcttctcaccaatgccatcagaggaaaaggctgcttcccctcccaaacctctgctttcaaatgccttggcaacttcagttggcagaaggggccgtctggcccaatcttggctgcaactatttgctcctgggaaaatgatgtaaatcactcatttgcaaaacaaaacagtgtacc

SEQ ID NO: 86 - DNA, 146 bp, Homo sapiens
acaggatacttaaaatggaataactttttggttgcaaaacagagacatggttctataatgcttcatgtccctccaagatttgagatcaatttagggattgtgaaattttttttttcaaatttcatacaatcatatttcccagtacc

SEQ ID NO: 87 - DNA, 572 bp, Homo sapiens
atccctagcattttaaaattcagttgttacagggatcccacataatattttgtcatttatatgagggtggatgagggctgaaatttcatcttgggtcttggaacagattcatgggcacacattttaaagctattggtcctcagttctgcagattaagaaactccaatttattgattccccagggtaatgagaaaatgcattgagtgatatataacatccactacattcacaggaaatgctgtcctggatcaaaaactgacctggtcattgaattatgttggagaactcataaaaattccatggagaaagtgatattcaagttggctcatgaattctgagtaaaagtttaaaagcaaaggagaggatagccttacagagataacaataggaacaaagtcacagacttgtggaaatggaagaccgggctagaaattaggacagttcatattcaagcaagcagggttgggtttgtgaacaaataccttgaagctttggatgccttggagcccttgacagtttttgagaatgtatcaaaacaattaaatagtctatttggaagtgagagccctggt

SEQ ID NO: 88 - DNA, 512 bp, Homo sapiens
  misc_feature (1)...(512): n = A,T,C or G
ggtaccttatctccagaagcagactgtttggggacaggcgcagtgcctgtggagcggcacttgacatcagcgtctcttcccacatggagtgaggagcctggccttgacaaccctgcctttgaggagagcgctggagctgacaccacacaacagccacttagtttaccagaaggagaaatcaccacgattgaaattcatcggtccaatccttacattcagttaggaatcagcattgtgggtggcaacgaaacacctttgattaacattgtcatccaggaggtctatcgggatggggtcattgccagagacgggagacttcttgctggagaccagattcttcaggtcaacaactacaatatcagcaatgtgtcccataactatgcccgagctgncctttcccagccctgcaacacactgnatcttactgggctttcgagagaagcgccttttggcaacccgangcacacaancattctgaaaggnaactctccccnagaaaaaaattttncnng

SEQ ID NO: 89 - DNA, 573 bp, Homo sapiens
  misc_feature (1)...(573): n = A,T,C or G
actcggctgctcctccgcgttctgagtcgcctcctcaacaatctggacctcaagtgctttaagggcaacagcaggggacgcggcactggctttcagcattgcaactgcctcactgtgacttaaattggtcaaatcaatgccgttgatatttagcaacacatcacctctctttattctgccatctcgtgcaaggcagccatggggtggcacactggtcacaaagatgggcagctcaccactcttacttcccctgcccccagcaacggtcatgccaagggattcatgtggttccttctttacagtaatgtgtttttcttggcatgtaacacactgagtaagatccttatgtgagcttggtctgctataatacggtggtggtgtgtggtgctggctgctgctgctatgatttcctgcttctctaatggtgttaccaggctggggtttccctggtctagcaattggtaaattcactctntctccactggcctgaataatctgggcagcaagctccggaagttccatacttcaggtcgtgcccattgatggccacactcggcattgctgcttancctg

SEQ ID NO: 90 - DNA, 658 bp, Homo sapiens
  misc_feature (1)...(658): n = A,T,C or G
ggtaccttttaacccaccctcctccaatcatgggaggagttgttcgggatctcagcatgtctgaagaggaccagatgatgagagcaattgctatgtctctgggacaggatattccaatggatcaaagggcagagtcacctgaggaagttgcttgccggaaggaggaagaggaacggaaagctcgggaaaagcaggaggaggaagaggctaaatgtctagagaagttccaggatgctgacccgttggaacaagatgagctccacactttcacagatactatgttgccaggctgcttccaccttcttgatgagctgccagacacagtatacccgtgtgtgtgacctgatcatgacagcaatcaaacgtaatggagcagattatcgtgacatgattctgaagccagtagtcaatcaggtgtgggaagcttgcttgatgtattggatcaaaagcttnttctttccctggacaaccangtggacacaaaaaaccgtggtcanaaatgggttaaagtcanatngggccccacttggccccaaggccttccaatttnggctancttaaaaatccttggcttttaaccnctacttttttgnagggaatttgaagcttacctttgggccttgggtggggttgnaatcnaagngggattcctttnngg

SEQ ID NO: 91 - DNA, 570 bp, Homo sapiens
  misc_feature (1)...(570): n = A,T,C or G
acctctgactacaccttcatgttgggccctgaccaacagaccctcaggttgtgagttttggcttcggggagaaaattcttcctgcttgatgtagggcaaagtagctgatttggcagattcctgttgccgtggcagtccaagagagatagatcccactgacggcttgggtgtttcttgagtgtaggaagcctgattatgagaagtcaaataagtgcctggtgttccctgtgagatggagcctcccattataaaagatggtttttctgaagccactgtggttttggatgacgggatgagagggggccggtggcctggttggtcgagttgtcggaagcccgaacgccttcagggagattagttatcacttgatgtggagcaggctgaaggacttcccactctctgtttggactcttggatgtgccacatggacttgtagaacttctacattccaaatctatctggncttggctctggccnttgttcctncaggagtgctgactcatgcnttgntttaatgngtcgctggtaganaacatanccgttactggggtccaatgggatgtacatngg

SEQ ID NO: 92 - DNA, 603 bp, Homo sapiens
ggtacacatgtttttattagattcagtcctcacaacgaatccattcaaagatacaactcacagtggtgaaatgactggccagaggttagccaggtagcacgtggcagaggcagggataccaagagtcctttccatcatatcacactgactaagttttcctgggttctgtcgaaaatattaatggttcattgggcataatggtttctagttcttttctattatttcatccaaatgaattttccttctcatttactatgaaagattttgttagccttcacatcttgccctactgcttataaactaaggaaaggcaggttcctccacacagaacagctctctcctctatcactttctatatgaaactttcaataagacatatcgtgtttatctcaagcccaccatagctgaggaggaatcgcttgctttcccctataattcccagtgcccagcattctcacaactaggaggttcttgagaatctcctcatttatacaatatgaagtaaaagccaatttaaacttttaaatggtaacttaattcaatgctgaatatcaaaataatcaactgttaaaaatttaaatgattgttttgatatattcttgt

SEQ ID NO: 93 - DNA, 627 bp, Homo sapiens
ggtacacatgtgtgcccagcattaaaaaaagatgacacagatgctgctcacaaatgtcgttttgaaaggaagaaaatatatataatcataaaacaaacaacaaaataagataaaatatggggaaatgcccaaaccaactccatgccaaggaaagagcaattggctaattcctaaattcaccaataggttcctagaagctggtctttgataaaatttttattggttttcagtaaaggtggaaaaacaaggagaatttattgagcttctttaaaaaaaaactaaatttttttcaactcaaaaagattatcccttttttaagattagcctttcttatttgagaagccatcaacaaaccctttctctgactgatagtgacatacataactggtttgtttatgcaattttaatgtcattttttggatgtggatagaggcagaagaaaagagaagacatcctgggcccagattgcaacacaaacacagaactgacgtgacagctgtgggggatatgggacagagatacaggaaggaggagcctggccagggttgcagagtgcagtaaaatcagactggggagctgagagagccctcttggagaggctttgaaatgcaggccggggagtctgga

SEQ ID NO: 94 - DNA, 331 bp, Homo sapiens
ggtacctatgataatcagatggagatctggggaggggagaacgtggaaatgtccttccgggtgtggcagtgtgggggccagctggagatcatcccctgctctgtcgtaggccatgtgttccggaccaagagcccccacaccttccccaagggcactagtgtcattgctcgcaatcaagtgcgcctggcagaggtctggatggacagctacaagaagattttctataggagaaatctgcaggcagcaaagatggcccaagagaaatccttcggtgacatttcggaacgactgcagctgagggaacaactgcactgtcacaacttttcctggt

SEQ ID NO: 95 - DNA, 752 bp, Homo sapiens
  misc_feature (1)...(752): n = A,T,C or G
ggtcctgtcccgcccctctccccaagcgcgggcccggccagcggaagcccctgcgcccgcgccatgtcaaagaaaaaaggactgagtgcagaagaaaagagaactcgcatgatggaaatattttctgaaacaaaagatgtatttcaattaaaagacttggagaagattgctcccaaagagaaaggcattactgctatgtcagtaaaagaagtccttcaaagcttagttgatgatggtatggttgactgtgagaggatcggaacttctaattattattgggcttttccaagtaaagctcttcatgcaaggaaacataagttggaggttctggaatctcagttgtctgagggaagtcaaaagcatgcaagcctacagaaaaagcatttgagaaagctnaaaattggcccgatgtgaaaccggaaagaacngaacncaggcttaccaaaaagaagctttcttcacnttcgaagaaccaaaggggaaccagctttaanggccnaaagttgnaaaaatttccaaaggactggngaatccncnaagtttgtgggaaaaaaattcccttanccttanttccccaattaaaaatntttggggncccaaaagnaaaaatttnggggttttgaaanaaaatttaaaantgggntngaaacntttttgggaaattccccaaaanaacttttgccttccctttgnccttaaaaantttnccatgggggggnaaaanggatttnnccttgncccnggggngggnc

SEQ ID NO: 96 - DNA, 405 bp, Homo sapiens
tacaacaaacaccgaaaacaaagtaaaaaatgaaacacaactagagaaaatgtttaggacacatgtcaggaggttaatatccctaatactgaaaaatttcttgctagtaagccaaacaacccaataaaactctaaatgatacttcgtgagttgataaaatgatttccaacttgagttgtcagacaaaacatttgagatagactaacaaaattattgtttatctaaaactctaattgggcatgttgtatttttatttgtggaaggtggcaacactatttcagacacttgttctcatttggccctgcagtaactcaatgagatggggaaagaggttaattaacctctccaacagcagtttcctcatctgtcaaatacagtgtgagaattaaattggataatataggt

SEQ ID NO: 97 - DNA, 499 bp, Homo sapiens
  misc_feature (1)...(499): n = A,T,C or G
acagaaacttggtgggaaaaggggactgtggccagagttgggaccctggagcagcatcctctgcagagaaggattttgtctggccagagcctggagaaacctgaaaaagaaccagtcagctagccagggtctcagagaaaagcagattacacactcaaattgggtaatttgagcagagcttaataaaggcagtatttacaaagtgtgggctaagcctcccatgagagtgcagaaccctggggctagcagtgtggggcgctattcccagccccctcaatccattggctgaggccgctggaagccaccgggccaagggagcttgttgatgtgggtcacacgggcatgttcccaggtcaagagaggagagtggagagtgaatctanggagactcaagagggaagaagtgacttccactacctttcctttctggccgttttgcttccanctggcttctctttttccgannccntagttttgggtttaanggnanntangtnaa

SEQ ID NO: 98 - DNA, 688 bp, Homo sapiens
  misc_feature (1)...(688): n = A,T,C or G
naggtacaagttatcaatccgagggacaagagggagggacaagaaccaggtctcagctgcattcacatcctggaccctgtcatctcaaagccagttccctccctgccttccaacttggtttcattcactttggattgagttgcgttctcactgaacagaaacccacaacccaaaacaagggcagcccatggccgtgattaagctctgcaccagtggcgaagggatcgagtgggagaccagaattcagctccgcctctgtgcggcctcaagggagttatgaacttctgagccttagacatgcttctgagctgccaccaagctgcctnatggggctgcctaaggattaatgnattaatccaatcccaggcacatnagtcattaataaaattaagaatacngngaccactaaacccactactttngaagtacttcctactaactacnttaaaccccaacttgaaggttttggaaaaganaatgnccacttggaaaccaaaccggcnnaaanggaaaggtaccttggaggcactttttcccttttggggcttncctanaatccntttccattttctttttgacctnggnaaattncccnggggaccccatttacaaagtttccttgggcccgggggntttnaagggctttanccaagggnttanggggcttgggaaaaagncccccacttgn

SEQ ID NO: 99 - DNA, 657 bp, Homo sapiens
  misc_feature (1)...(657): n = A,T,C or G
ggtacttttcttagtatcttaacatcacatgcattttgtagtttatggtctccagtctccagctgtttttggagcaccttctaactttgagagggtgagctctagcctgtaaaatggactgtgggtggctcgtggagaaggtgccctggtgtgcttttctgtgtcctctctggattctccctgagctgtccacctctgaagcctgcttcaccttcagactgccagggcaagacatgcagcttctgcagaactcatggcagccgttttccacttggccgagctgggtctgtgaagcagagaggaatcagtaataggaaagaaatgtaagttgnttttttcccccttagaatacctaccatactggatttcagcttggagtgcgcagcatgaagcatttgtggtcaaaaaagaggncttcctttttccttctnctggtttcttttcttncttcttcccaacttccccaangcttactggctttcttntnaagncacgtgtgtaaaatanccttgagggaaaaaanggttccggcttggganatttggatntacctaaagggncagaataacccttctttgcctggttcntttttggcctaatcnagggaatttttcgactggggncattaatggncctccggcggccgttaaanggcaa

SEQ ID NO: 100 - DNA, 504 bp, Homo sapiens
  misc_feature (1)...(504): n = A,T,C or G
atttcttctttgcatgcaggaagaaaattcactcgccgtttgataatttgttatggtcttatttgacctgttatccctgcctcccatgttctctttaccctacaacccatcagctgttagagtttccttttccaagactctccatgtccatcccctctgcattcccccctttcactccatcttctgtaacccagcccctcgggagctgaggaggtggaggcggatatagacacggagagtgctggatgcaaaggtgttacttgtggcaaaggcgccgtgtgtgctgaggatagatggcaggtatgagagagggcaggatgaagcacaggggtggaggggagcagagagacctacaacaaaacccactcaaggggtatgtgagatagacttttttttctggnctttttgtgtgtctgtaatgggggttggaaagtggggtggtctcancagntaattctctggagntctctggacttgagcctngtcnnaanagcccagaanttt

SEQ ID NO: 101 - DNA, 685 bp, Homo sapiens
  misc_feature (1)...(685): n = A,T,C or G
ggtgcctgttttgccacttaggaagctggaaagaattttcgagtcaagttaacccaaccccctcttcttttcacatgtaagcacactggctcagccagaactcaggtctttcaacctcacagttggtgaagactcttacatgttggttccaagttgctcaactctcagggctcagcctacaaaagactcggcatttcgaccagctcagtccagaggactccagagaatgactgctgagaccaccccactttccaacccccactacagacacacaaaaagaacagaaaaaaaagtctatctcacataccccttgagtgggttttggtgnaggtctctctgntccccttcacccctgngcttcatcctgcctctctcatacctgccatctatcctnagcacacacngngcctttggcacaagtacacctttgcattcaagcactnttcgggnctatatncggcttcaacttcttagcttccgaaggggcttgggtacngaaaaaggatgaaaggggggaatgncaangggatnggcctgggaaagttttggaaaaggaacctttaccnctgaagggttgtaggggnaaaaaaaacctgggagggccgggttaccnggtcaaataggaccttnccaanttttaacnggggagggaatttnttccngctgccaanaaaaannncttccn

SEQ ID NO: 102 - DNA, 498 bp, Homo sapiens
  misc_feature (1)...(498): n = A,T,C or G
ggtaccatatacttaaggctatagtttatttcataactttttttctagccttcatatcttgtgttttcaggttgtcacaatattcttttaaaaattaagcattcttacggcttcactcatgtgcaacatttataattatttgcatttgccccctcaatgatctcaatagaataaatcaggctccactatactcatttcacaaagacacattcattacaaaggataaaggactgaaatatttgttttgcaatctgttgacctaagtaggaataggaagcacagtttcagtgcttccaagtttttaacccctgactgagacgttttggttgagtattactattcttattctaccaatgataaagggaaactgaatgcccaaccatgtgctggctgtttacacatatgcaacattgactggttctcacaaccaccttgaggaataggcattgncttcaatttacaaatgaggaaaacaaccattttcaangngcattttnc

SEQ ID NO: 103 - DNA, 697 bp, Homo sapiens
  misc_feature (1)...(697): n = A,T,C or G
gnnatctgaaattcgcctttcnagcggcgccgggcaggactaaaaatgtaagtttattttgccatacccctaacaacattttatttaaattatattgtgacttgattacaaatcttttaaatgacattattggcatatttttcttaaactttgtaagaaaaagataacatttcacattttagtagcaaaatcattgttaagagatagtcaattttgtgaaaatatttgagtgctaatcaatttttccaggatgatcttctatcctttaatatttagatcttccttttgaagcacttacatcatcatcaaatttttggtcatttgntgngncatctaatttctggttcattttctaatggcttcgtatgtgaatgaattttagttattcctaacgtcattggtagccactcttttgaaatttttttttaaaccaggctttcaattttaatttatanggaatttgcattgggatatagatgaccgctcaaaattcccatgngagactgntgaaatgncctaaacnattcgcctggacnctggattaanccgnggcctcttaaggtaatctnganggggtggcttattgggaaaatttggattnnggcccggttactntgccaggttngacttnnaagggcccanaaggacctnggaaatnaagatnccctnaacccttccttggnaaanaaanaagttn

SEQ ID NO: 104 - DNA, 504 bp, Homo sapiens
  misc_feature (1)...(504): n = A,T,C or G
accatcattcagaataactcttccaatttctgctttcagacatgctgcaggtcctcatctgaactgttgggttcgttttttgttttttttcctgctccaagaaagtgacttcaaaaataactgatcaggatagattattttattttactttttaacactccttctccccttttcccactgaaccaaaaagaaatcccatccctaaaacctgccttctccttttatgcaaaactgaaaatggcaatacattattatagccataatggtatagatagtgattgcgtttggctatgtgttgttttctttttttttaaattatgaatatgtgtaaaatctgaggtaacttgctaaccgtgaatggtcatataactttaaagatatatttataattatttaatgacatttggacccttgaaacatttcttagtgnattgatatgttgactttcggtctctaaaagtgctctttattaaaataacaaatttctttaaagggnctaaaanc

SEQ ID NO: 105 - DNA, 746 bp, Homo sapiens
  misc_feature (1)...(746): n = A,T,C or G
ggtactaggtgtctcataattgaaccctctatccacatgtgcggcttttagctgactatgtctttgctatgaagcctggcgatttagagttttgcttaactatgaaaccacagaacatttttctgtagttcaatgatttacttgtgcttgtctttttaatatgacaagagtcataattaccccaaagaaattagaaaaccacatcactccagcatttcatgctgataaagggctaaaggttgttttttaaatccctaattaccgctttagaaggcaaagctgtgttagaggcattcaaagatctgaaagaactaaacataacatttccttcatacatcacaaaaacaatctatatctaaaatatttggagaagggaagtattttttaaaatcacattgngccctggatgaacctggaaatggcttanccatatttcaagaatatggntctaggacccactggaaggaaaatttgggtaatttaaataaaagancccctttttaggagganccgaaagtccaaccttattcaattccccttangaaaatngtttcaagggggtcccnaaagggccatttaaantaattttttaaaatattatcctttaaagggtttttttggancccnttnnccggttgnccaaggtttncccttcgnaatttttncccctttttccctaaantttaaaaaaaannggnaaacccccccctttgnccaaagcccatncctntttttttaccccttng

SEQ ID NO: 106 - DNA, 645 bp, Homo sapiens
  misc_feature (1)...(645): n = A,T,C or G
acaagcttttttttttttttttttttttgagatggagtctcacattgttgcctgggctggagtgcagtggcacgatctcggctcccgggttcacgtggttctcctgcctcagcctcccaggtagccgggattacaggtgcccaccaccatgcccagataattttttatatttttagtagagacggggttttaccatgttggccagactggtctcaaactcctgacctcatgatccgcctgcctcaacctnccaaactgctgggattacaggcgtgagccaccacacccggctgagttgttgattttttagtttgntcagctttttacttggtagaatgaagtgatgactgncgacctccttaagggccagactagaaactgggagtctcctatttangncgccttaaaaattgnaagctngacattggtggtgaagcattggaacaattcttaattctggtacctganangggtgaattttggtttcactngcngcttatcagtantcaattccttgaacttttaaaacnttagttacccttngtagggacagnnttcaaattttccttgacttagggaacccttantctngggacaagttttattctaactgactgttgcaaacttanggcttcntacctggcc

SEQ ID NO: 107 - DNA, 684 bp, Homo sapiens
acagccagatcttaagatgagtctgtgtcaaaatgacctgaacgcaagtctgtattcttgcagagtaacagagtgttcgtctgtttctgtctaaaagtcataactatacagatatctgggaatgcttgcatgaagcttttactcccgagagcatactactacttacggttataacttgttgatgtctatattggcttaattcaaatgaaaagttcactccaggagcagctctttgtaatccacaccaccccccagactgttctgaataaacccagaacaactcatacaccagcctaagcatggtctatttttctgggatgggacagaacataattgtattaaaatataaaatcagttttaaaaggtctggaaggacatatcttaaggccatgatagtaagtacagctggggtgctggggaggggacctcaactagggttggtggcaaaaatgggacttttaactttggctttaacatcctggtcctaaaaagaagactagatttacctattatatatgcaatctaaaattaattcaaaaagtcatcagcgaggacccccctaagattctgggtggtaagtccaccaaaggccaagagctaaaacaaaagccttttccacatgttctgagaagttggcccaaaactgctgaatctataggtcttagcatgctctatctatgtacc

SEQ ID NO: 108 - DNA, 236 bp, Homo sapiens; identical to SEQ ID NO: 27

SEQ ID NO: 109 - DNA, 497 bp, Homo sapiens
  misc_feature (1)...(497): n = A,T,C or G
acgagaagtgtggtgctggaatatctttccggtgaggcctcaagaagtttacagtcacggtggaaggcaatgaggagccagcatatcacatggtgacagcaacagccagagcaaaagagggagggagaggtgccactcacacttaaacaaccagatctggtgtgaactgactcatcaccaaggggatggcactaacccattcatgagggatctgcccccatcatccagacacctcccaccaggcctcatctccaacactggggattacatttcatcatgagatttggagcggacaaacatccaaaccatatcagtaggatgtctgacattcatcatacgatgtctgagtgaagggaggtttaagggcttattttgtctccctggatagtaatggaaaatgtatatctgaaagagatgtctgaaaaagaaagtttaagtgggtggcttgcacacttttggtttgctagngggctttttgagctcanattctcatttgn

SEQ ID NO: 110 - DNA, 722 bp, Homo sapiens
  misc_feature (1)...(722): n = A,T,C or G
ggtacagccggtcctcttcttccaggaattggctactgtccctctgcaatcccattcatgataaaagcattcttatacaacacaaaagatgctgcatcaatgattctcaaacctccaagacatccaaatcaactagcatgcttaagatgcagattcctgtgctcgactcaccaacttccagaattttccattccctaggtctgaggtgaacctgggaatctgccttgctaacaaatgatgctgacactgttgatttggggaccccacttggagaacctgggctctagatctctaccctcttactgaagtcttcttccacttcctgctttaactggaatccaacccgccacccctgnagcccttgcaaagtgaattgcccttttcccttactctggttttttctcctctggttctagcctagattccanggaacatnaactttgggcntggcattttcccctngatntgggatccttttggnccagnttttccccaaagnaagccntnaattcaaaatctttccccnttnggttcctattnacccggaccttcngggggnaaaaaatncccaaaagcccccttacnaaatccctttttcccaaacttcaattgggaaactngggctttaaaaaagnccccntttnccaaanccnaaaantgggcctaacccccccccnttnaaactttnttttttnnanaaattntttttnanaaattncctt

SEQ ID NO: 111 - DNA, 614 bp, Homo sapiens
accagggctctcacttccaaatagactatttaattgttttgatacattctcaaaaactgtcaagggctccaaggcatccaaagcttcaaggtatttgttcacaaacccaaccctgtttgcttgaatatgaactgtcctaatttctagcccggtcttccatttccacaagtctgtgactttgttcctattgttatctctgtaaggctatcctctcctttgcttttaaacttttactcagaattcatgagccaacttgaatatcactttctccatggaatttttatgagttctccaacataattcaatgaccaggtcagtttttgatccaggacagcatttcctgtgaatgtggtggatgttatatatcactcaatgcattttctcattaccctggggaatcaataaattggagtttcttaatctgcagaactgaggaccaatagctttaaaatgtgtgcccatgaatctgttccaagacccaagatgaaatttcagccctcatccaccctcatataaatgacaaaatattatgtgggatccctgtaacaactgaattttaaaatgctaggattatcccttccctagcactatgtcatttttaaaggtgtacctcg

SEQ ID NO: 112 - DNA, 499 bp, Homo sapiens
  misc_feature (1)...(499): n = A,T,C or G
acttttctggaaattggctttaagagctcatcctgcatttttaaaatctctccaactggatcaaattttttatatactcgtttgataggtttttttaaaacacatgactcttcaggactacaagcagtattagtctggtttcctacagaagcctgtcctgaggaagaatttggactagctggtctggaacttaagttagaacccacaacagctgtctttccatcactattatttttacattctgtatcaatgattaaacactcctcatctgtatcactgctgcagagaactgtaccttcagtttttgctgcttctgatccaacagtcttttcctttgagttgtctaggttttctagaacattaggtctttcaccatcagcatgtaatatatctatagtcatatcatttttattagaagtttcaatttcctgagaatttctaactggaaggcatcagatgttttcaaggcactatcttggatcaaangcttggcaaaaaa

SEQ ID NO: 113 - DNA, 697 bp, Homo sapiens
  misc_feature (1)...(697): n = A,T,C or G
gcgtggcgcggcccgaggtacctaacatgacagatgctcctacagcccccaaagcaggaactacaactgtggcaccaagtgcaccagacatttctgctaattctagaagtttatctcagattctgatggaacaattgcaaaaggagaaacagctggtcactggtatggatggtggccctgaggaatgcaaaaataaagatgatcagggatttgaatcatgtgaaaaggtatcaaattctgacaagcctttgatacaagatagtgacttgaaaacatctgatgccttacagttagaaaattctcaggaaattgaaacttctaataaaaatgatatgactatagatatattacatgctgatggtgaaagacctaatgttctagaaaacctagacaactcaaagggaaaagactgttggatnagaagcagcaaaaacctggaaggtccagttctctgcacantggatncccantgaanggaagtggtttaaatcaattggttcccggaatggtaaaaaattaattagtggatgggaaaagaccagcttgttggnggggttctnaacttaaagtttcnanaccannntangtccnaattttttccttnagggaaagggcttttntnggnaaaccgncttaaaacgggttngnancccctaanaantcttggngtttaaaaaaaacctttttanccgngttt

SEQ ID NO: 114 - DNA, 497 bp, Homo sapiens
  misc_feature (1)...(497): n = A,T,C or G
acccacttctgacatctggaccacttcttgcagtcattgggggtcatcccccacactggtaacctgtcatcaaatgggccacagcaacattcagcttaagtatttctccttcccacatccaagggattgagtgggagtgagattggggggtggaaaaaacagtgaacagtcctggtgagttgcagatgtggtctcattccctagagatgcaggatgcagctgacctgaatcaggacagatccctgcaggagggactcctggtgccatgtcagtcccacctggcactgccctagctcccaggctccgcctctgcatctttccttgctacttcctctttcacttctcccccgttcccagacccaccagacagagcttccagagtgtcaggacatgtgtgacttagcccagattcagactttagtcacaagcaggatcaagcatanacatctaacttccagcatgggcaattctctggtggggctccctgnntggantgg

SEQ ID NO: 115 - DNA, 687 bp, Homo sapiens
  misc_feature (1)...(687): n = A,T,C or G
ggtactatgtgtgaagaaatggagaaaaggaaaaatcangtgtagaaaaataagaaaaagcaagagtgaggttggtgcctacagttcacagcatgtgataaggactgagcatttattctattatttggtcataaaaatgcaggctgtaagggcctacacacaccagcttatcgnagacttggctctgagctttcctgcagccaatacaaacagggagacacancagagaattgccatgctgggagctagatgtctatgctgatcctgcttgtgactaaagtctgaatctgggctaagtcacacatgtnctgacactctggaangctctngctggtgggtctgggaacgggggagaagtgaaagatgaagtagctagggaanagatgcagaggctgnnccttgggaacttaggcaagtgccaggtggggactgaccatggtanccaggaattccnttcctggtangggattctggtcctngaattcagggttaagcttgccattcctgcatttcttntaggggganttganaaccccctttttggaaacttcancaagganttggtctcccnggntttttccccccccctaaattnaattccccnttaatncctttgaattcnggnaagggnnaattctttancctaantgttcttggggcnctatttggtngacagggttncnangg

SEQ ID NO: 116 - DNA, 508 bp, Homo sapiens
  misc_feature (1)...(508): n = A,T,C or G
ggtacccattttctatttcaagtagattaaccccttatattctgctaaaatcatacttgttgcctaacacccagttaacaaagcaaaaaaaaatcagttaatttataaaaacaaaatgctaattcttattctatgtgaatgtatttcatagattttaaggggttaatcaccaattagaagacatgctgtgtccacactattttaagattaaacgttaatgggaatatattaattcaaattaacatggtcatgtaaaatatataacccactcaaccatttaaaaactagtgtgaacactgctcaattctagaagagacaaagacaaaacaaacaaaacagccacacaaaggacaataaatgccaggctctgcatccaaaatccctcctttatcaaatggcagatgtgacactgagcttttgaaaaccttggncaaaaatccttccgatgtcttggcagcaacccctggcaggatcaatcccctctgntataaagntttgggcccngccc

SEQ ID NO: 117 - DNA, 644 bp, Homo sapiens
  misc_feature (1)...(644): n = A,T,C or G
acaggggttaaggaaggctttgccggaagaacaattgtaaatcatgagagttactacttgcgcattgtgtggtagtctctttaatgcataatggtcctttttaataccaaaaattaattaataaaggaaatgattacattgtccaaataactgttaaacacatgacagatctgttttatgatactgtgtttgacagttaaacattaagtaaacatttaattgactttaagcttgaaatgttcagaatgctctaacccttgctacagaatcttttctgcagcaagttaagtattttgtgtgttttttcccacctgtagcttatcaggcccggtccaaagccttctagcagaggggattgatcctgtcaggggttgctgccaagacatcggaaggatttttgaccaaggntttcaaaagctcaatgncacatctggcattttgataaaaggagggattttggatccaaagcntggcnttattggccttttgggtggctggttagggtggntttggctttngccttttcttaaaaattaaccanggttnccacttanttttttaaaagggtgaatggggtaaaatttttccntggaccnngtaaattgnaataaaaattcccctttaccgttaaacttaaaanangg

SEQ ID NO: 118 - DNA, 500 bp, Homo sapiens
  misc_feature (1)...(500): n = A,T,C or G
ggtacaaacccatgcagcctggccctcacgtggtcaagatcttctttgctggggacactattcctaagagtcccttcgttgtgcaggttggggaagcctgcaatccaaatgcctgccgggccagtggccgaggcctacaacccaaaggcgtccgtatccgggagaccacagatttcaaggttgacaccaaagctgcaggaagtggggagctcggtgtaaccatgaagggtcctaagggtctggaggagctggtgaagcagaaagactttctggatggggtctacgcattcgagtattaccccagcaccccggggagatacagcattgccatcacatgggggggacaccacattccaaagagcccctttgaagttcaagttggccctgaagcgggtatgcagaaagtccgtgcttggggccctgggctccatggtgggattgtcnggcggtcaacngacttcgtggnanaatccattggctctgaaatnnggnctctgggg

SEQ ID NO: 119 - DNA, 624 bp, Homo sapiens
  misc_feature (1)...(624): n = A,T,C or G
actcaatctttgcctgagaggggccttcaatggcaaaccccagagaccccacttcagagccaatggattctaccacgaagtctgctgaccgcccgacaatcccaccatggagcccagggccccaagcacggactttctgcatacccgcttcagggccaacttgaacttcaaaggggctctttggaatgtggtgtcccccccatgtgatggcaatgctgtatctccccggggtgctggggtaatactcgaatgcgtagaccccatccagaaagtctttctgcttcaccagctcctccagacccttaggacccttcatggttacaccgagctccccacttcctgcagctttggtgtcaaccttgaaatctgtggtctcccggataccgaccgcctttgggttgtaggcctcggccactggcccggcaggcatttggatgcangctttcccaacctgcacaacgaanggacttttangaatagtggncccagcaaagaaaatcttgaccacnttgangggccagctngatgggtttggacctttggccggaacacccttanggccaantccngcanttgggggccgtacttagggaccaacttggnnccaactttggngaatatggn

SEQ ID NO: 120 - DNA, 504 bp, Homo sapiens
  misc_feature (1)...(504): n = A,T,C or G
acaggcatggcaccgacatctgcttggcttctgctgtagcctcaggaagcttatagtcgtggcagaaggcaaagagggacggcaagagaggaagcaagagagagagcgaggaggtctcagactctctttaataatcagatctcctgataactcatttccatggggagggcaccattcatgagggatccgctcccatgacccaaacagcccccaccgggccccactgtcaacactgaggatcacatttcaacatgaaatgtggaggggacagacatccaaactatatcacctccatactgttttccacagcattcccaccaacagtgcacaggggtttcagtgtctccacatcctcatcacacttgttatcttctgtttttgtttgtttgtttgtttgttttttatagtagccattctcatgantgtgaagtattaacagtgtcttttgaagatcagaaatttctaatttgatgaaagtccngnttancannttttttcnttttn

SEQ ID NO: 121 - DNA, 630 bp, Homo sapiens
  misc_feature (1)...(630): n = A,T,C or G
ggtactatcctaagtttaacactgcttcacagtaaggaaagccgatcaaaatttaaggagagattagaatccagaaataggcccacacatatatatagtcattgatttttaataaaggttcaaaggcaaaacaatgaagaaaggatggtcttttcaataaatgatgcagaaacaactggacatccacgtatgcaaataaactttaatccatgccttttactttatccaaaagctaatccaaaatagaaacctccctttcctccctcaaaaaagcttctagagaaaacacaggagaaaatctttgtaaccttgggttcacaaagatttctcaggtatgacaccataagtatgatccagaaaagaaaaaaaatgataaactggacttcatcaaattagaaatttctggatcttcaaaagacactgntaatacctcacactcatgagaatggctactataaaaacnaannanccaaccaaccaataacngaagattncaggttgatgangnttggagacnctgaanccctgngcactgttggtgggaatnnttntggaaaacagttggangngaattagntnggngnntngcccttccanttcatgggnaagggacctnagnntgancgnggg

SEQ ID NO: 122 - DNA, 431 bp, Homo sapiens
  misc_feature (1)...(431): n = A,T,C or G
actgaaaagcttggtcataatcttcctgaacatggaatgatctagctagctgatagcagctctctgcttgcatagcttccacttctgtattatggaatgcatggagggccagatgctggactttactataatcctttttgaagaaaaagtgatttgccaaatggttcaataccatagggttgctaggatcaatagtataggctctggaaagaagctggacaccatttttaatggaatcagcctctttattgttgagttctagaacagccagtccaaccaatgctcccacgcatttggaattgagttccagggctctgctgaatgccagacgagctttttccagtttgttaagtttcacaaagcaatgacccattcctaaacnaacttccgctggacattcctgggttaagtacctnnggccgngaccacgc

SEQ ID NO: 123 - DNA, 504 bp, Homo sapiens
  misc_feature (1)...(504): n = A,T,C or G
actggctgtcctctgaggcaccttggtgtcttttccacaatggtttattttcctccagtaggctagactggcttccttatttggcagtttcagggcagcatttcaaaagcaggaaggtggaagtggcaaggccccttgaggccctttcttcagagctcacacagtgtcacctttaccacattctattggtcaaagcaacttccaggccagccaaaattcaaagggtgaggtagtagactctacctcttttttcttttgagacagaattgcgctctattgcccactctggagtgcagtagcagcctcatggctcactgcagcctcaacctcctgggctcaagcgatccttccatctcagcctcccgagtagctaggaccacaggcacataccaccacagtcagctaattaaaacattttttttggtagaagatgggttctcacttttttgcccaagctgatcatgaactcctggccacnttngggcntttcaaggggnaaccccc

SEQ ID NO: 124 - DNA, 632 bp, Homo sapiens
  misc_feature (1)...(632): n = A,T,C or G
ggtacaaacacagtaaagaacaacacagataccagtcctgcctttatcaggaaagacaaaacaaaaacaaaaagtaaacattccagtaaaggaatgattagtgctattatgacaaggaaagcatagggaactattcgatcaaagaagagaggttacagttccccaaatctagggtgtttggaaaggaagaatatccttagtaaatgacattgaagctaaaacctaaactatgtatagcagtcagctagaaaaaacaggcaagaaagaatatttcaggtggagagaaacacatgttttcaggccaaaagctggagaacaaggtgagtttaaagaactganagaggtttagtgattacaatngttgaacaaaaggggggcattgtggaatgaatannaaagantggttttgtanattggaatctctgcagcaaaactccattcagaaggtataagttcangccttggtgggttactttggnaaggccgtagtgggccaggagnttcatgntncancttgggccaaaaagnngagaacccattttttccaaaaanaatgntttnaatttacctncntggggggggaatgnncntngggtccttanttctttggaanggtttaaattgnaaggtnc

SEQ ID NO: 125 - DNA, 496 bp, Homo sapiens
  misc_feature (1)...(496): n = A,T,C or G
acaagattaggaggggggaaaaacctgaacaaatcctggaacacacctatgtatttacgtcatgggaaaaggggagagaacacttcaaatatcaacaagttctgcgccattaactcattaatagctaaatggccacaccaaattgcatgtgaatgttagaacctctcagatagccacaataagtccatatttttttttaaaaaaaggaaaacacagaaataactaccaacagtgtctgagaagagagactaagttaacatacattgcatgtattgcaggcaaggcagaggcatttttttaaagcttttgcacagacttcatataatcttaaaaaaaatatgcaggcctttgcaagatttgacttgctgaaatccaaacaattttgactcatgaaaagtcataagacttcagctgaaaaaaaagaaaaaagttccagccttagaccaaaaaaaaaaacctggaanagtntgatagatttaacnanggtnggcacgct

SEQ ID NO: 126 - DNA, 631 bp, Homo sapiens
  misc_feature (1)...(631): n = A,T,C or G
ggtacaccttgttaccaaataggttgttctcttccccacccacctttgagcttttgctctaaaatacattcaggttccaagcctgaccatccttgtttaatctatcatactcttccaggtttttttttttggtctaaggctggaacttttttcttttttttcagctgaagtcttatgacttttcatgagtcaaaattgtttggatttcagcaagtcaaatcttgcaaaggcctgcatattttttttaagattatatgaagtctgtgcaaaagctttaaaaaaatgcctctgccttgcctgcaatacatgcaatgtatgttaacttaagtctctcttctcagacactgttggtagttatttctgtgttttccttttttaaaaaaaaatatggacttattgtggctatctgagagggtctaacattcacatgccaatttgggggtggncatttaactattaatggagttaatgggcccaaaacttggtgatattttnaaggggtctcttcccntttttccaatgccgtaantcntttnggggtggttccaggaatttgntccaggntttttcccccncctaaaatnttgaaccttgnccnggcnggncctttcaaagggcnaattnnanccnt

SEQ ID NO: 127 - DNA, 518 bp, Homo sapiens
caggtactcggtgcttcccaacacctccttattggaaaacagccaaggagatggtggctaactggaggcatcacccagcagtggtggagcagtggagcaaggtcatttgtgcactcacttccagattgctacgctttacatatggtccttcatttcctgcatttaaagttcccgatgaagatgccagtctgatccctccagaaatggataatgagtgtgttgcacagacatggtttcgctttttacacatgttaagtaatcctgtggatttgagtaacccagctattataagctctactcccaaatttcaggaacagttcttgaatgtgagcggaatgccgcaagaattgaatcagtatccctgccttaaacatctgcctcaaatattttttcgtgccatgcgtggaatcagctgtctggtggatgcattcttaggtatttctagaccccgatcagacagtgctcccccaacacccgtgaatagattaagtatgcctcaaagtgctgctgtcagtacc

SEQ ID NO: 128 - DNA, 865 bp, Homo sapiens
  misc_feature (1)...(865): n = A,T,C or G
accaaaggatagctgttctgtttaagtagggacctctcatggcctacaggctttgacatctgagaatcaaactggagaacattccgaagccgttcttataagtgtctccatctctacctgggctgaaatggaatgtgcaaatgtagcccagcctggtccttgggtgttgccagttgattgatgactgggagccaaagtggcatctcctttgacctaaacgggcgatgatgaaataaaactcaacagcctttctctcatcttgcattgtgagatgcgaaatagagcgtgtctctctgcctctcattttaggctgaggccgtccaaagcggccatgccccatgtttccactagatggcgctgacacttcaggcatcaaccctcatggcctctcagccttgcaaaggcagccacttaaagtcggtgtcctgtgtggggcaccaagctgagctgcagacacccagtaggcgcgaggcaaatgcgtcccattttaagaggcttgtatttatgagctctttgcttcctccctcccactatctttaaagaattgctctccatctcctttggcaaagttcctttgccctttgncttatttttgtgaaacccttcaaggtatttccagtccatttgcatccaatctggcatctttacngaanagcggtctcatatgctattggtggtaacgtgggactagtatttatgnggttgagaaccacttggctgtttgtcaaggaaaagtgtgcccaaaaaccaagaagtacctttggccgngaaccacgcttaaggccgaaattctgnagatatncnntcacacttggcgggccggttcgaaccttgcatntaaanggncccaatttggcccttatag

SEQ ID NO: 129 - DNA, 910 bp, Homo sapiens
  misc_feature (1)...(910): n = A,T,C or G
tactctttgttttggcacacttttcctgacaaacagccagtgttctcaacacataaatactagtccacgttaacaacaatagcatatgagaccgctctccgtaaagatgccagattggatgcaaatggactggaaataccttggagggtttcacaaaaataagacaaagggcaaaggaactttgccaaaggagatggagagcaattctttaaagatagtgggagggaggaagcaaagagctcataaatacaagcctcttaaaatgggacgcatttgcctcgcgcctactgggtgtctgcagctcagcttggtgccccacacaggacaccgactttaagtggctgcctttgcaaggctgagaggccatgagggttgatgcctgaagtgtcagcgccatctagtggaaacatggggcatggccgctttggacggcctcagcctaaaatgagaggcagagagacacgctctatttcgcatctcacaatgcaagatgagagaaaggctgttgagttttatttcatcatcgcccgtttaggtcaaaggagatgccactttggctcccagtcatcaatcaactggcaacacccaaggaccaggctgggctacatttgcacattccatttcagcccaggtagagatggagaccttataagaacngcttcngaatggtctncagttttgaatctcagatgtcaaaagcctgtaagnccatgaaaggtccctacttaaaccggaaccagctatcctttggnanctggccgggccgggccggttcgaaaagggcgaaattccacaccacttgggcggcccgttacttaanggaatcccgaactttggnancccaagcnttggcggtaaatcatgggccatanctgggtttcctgggggggaaaatggtattcccttccca

SEQ ID NO: 130 - DNA, 932 bp, Homo sapiens
  misc_feature (1)...(932): n = A,T,C or G
taccgcttgtttatccaaattttcctctgcaagtggagcatctgctaggatcaatagcagcagtgttaagcaggaagctacattctgttcccaaagggatggcgatacctctttgaataaagccctatcctcaagtgctgatgatgcgtctttggttaatgcctcaatttccagctctgtgaaagctacttctccagtgaaatctactacatctatcactgatgctaaaagttgtgagggacaaaatcctgagctacttccaaaaactcctattagtcctctgaaaacgggggtatcgaaaccaattgtgaagtcaactttatcccagacagttccatccaagggagaattaagtagagaaatttgtctgcaatctcaatctaaagacaaatctacgacaccaggaggaacaggaattaagcctttcctggaacgctttggagagcgttgtcaagaacatagcaaagaaagtccagctcgtagcacaccccacagaacccccattattactccaaatcaaaggccatccaagaaagattattcaagcaagacacatcttcatctactacccatttagcacaacagctcaagcaggaaccgtcaaaaagaactagcatgtcttcgtggcccgatttgacaagggcaatattatggaggtgcagaaaaaggcnggaaactcaaaaagcnaaccacctnggaaanccaaacngggaaaacttcacttgtcaagagcactccccttnaaaaaaaccnccccaagggggtttncaaaaactcagtcccnttccggtaaccngaaaaagggggacccgaaaacccccganacccnggcccaaaaattntaggaccttgccccggcgggcccgntncaaaangggcgaaatttttgggaaaatccattnnncctnggcggggcnggttttgaccattcn

SEQ ID NO: 131 - DNA, 890 bp, Homo sapiens
  misc_feature (1)...(890): n = A,T,C or G
actagaatttttggctggtatctggttttcggtcaccttttctgttactggaagtgactgagtttttgaaacaccttggtgttttttgaggggagtgctctgacagtgagtttcctgtttggtttctagttgtttgctttttgagtttccgcctttttctgcactccatatattgcccttgtcaaatcggccacgaagacatgctagttctttttgacgttcctgcttgagctgttgtgctaaatgggtagtagatgaagatgtgtcttgcttgaataatctttcttggatggcctttgtatttggagtaataatgggggttctgtggggtgtgctacgagctggactttctttgctatgttcttgacaacgctctccaaagcgttccaggaaaggcttaattcctgttcctcctggtgtcgtagatttgtctttagattgagattgcagacaaatttctctacttaattctcccttggatggaactgtctgggataaagttgacttcacaattggtttcgatacccccgttttcagaggactaataggagtttttggaagtagctcaggattttgccctcacaacttttagcatcagtgatagatgtagtagatttcactggagaagtagctttcacagagctggaaattgaggcattaaccaaagacgcatcatcaagcacttgaggatagggctttattcaaagaggtatcggcatccctttggggaaccagaatggaagcttnctgcttaacactgntgctatggacctanccanaagctccactttgcananggaaaatttggataaaccagccgganccttggccgggaancacgcttanggccgaattccncacacctgggcggncggttacctaagggaacc

SEQ ID NO: 132 - DNA, 606 bp, Homo sapiens
  misc_feature (1)...(606): n = A,T,C or G
actcaggcacttcacagtttacttgaaagaggctttggaaaatagataaagtgaaagaagaataaatacatatttttaataatgtaattttaaaaatcctttataatcaggactaagtcttggtttgcagaagctgtcacttaccctgaaacacagtatcaaaagggaaacttaaaacatactgtttgatttttttatttcctcttacaatccatgttttcaggtagaattatgactttccccccattgttacacatttctttacaaaggaggcctgtagaaattggacacgatcatgcttgagcatgtgagttagtcaaattatgagtccctgcctattgtccattacacaccgaatgttaatttaagaaccagaggcagaagttctggcttcctgcttgaaacccaattcttatatgaaaatttttaaaagccagaacctagcagcccatctgntttttctcttttgccggngnatttgganccttggcgggaacacccttanggggnaattcngnncacttgggggccggtacttanggganccaactttgggcccaannttggggaaancagggcnanattngtncctggggnaaatggtnn

SEQ ID NO: 133 - DNA, 606 bp, Homo sapiens
  misc_feature (1)...(606): n = A,T,C or G
ggtacttttccttaatcttcttcttcttcttcttgtcaccatccttcttttcttcttcctcatcagaaccaacatcttcaatttcaggtttgtcttccgactctttctcttctttttctttttcttcttctttgtcttccttttcttcagcctcatcatcgcttacttctttatcacgttccttctccacaaaaagagtaatgggatatccaataaactgagaatgtttcttcacaatctcctttattcttcgttcctccaagtactttaaatttagtggttgctggagcacctaaaagtcagattgtcatgttggaagcctctgcagagaacattttacagcaggacttttgccatgctatcaaagtgggagtgaaatatacccaacaaataattcagggcattcagcagttggtaaaagaaactggtgttaccaagaggcacctcagaaggtatttaccccttcgcagagaatgngaaatatactcataaacctgctatggagagactctatgcagttttacagatacgagcatgacaaggttcnggagatgaagctgtaccaaataagatagatccngnggaccactaaangaaaattccgag

SEQ ID NO: 134 - DNA, 598 bp, Homo sapiens
  misc_feature (1)...(598): n = A,T,C or G
tacntcaccatcccgtatttgctgctgtnccanaaggcatngncaaattgagggtcatactngatagcancagggtaaactgtggctccaatttcaaaacttncctttatgaacatcatcaccgangtattattgatgcaggntccttctgngaagatgaggataggcagctngcttttatcttgcacatgttcannnannctnttagccaccanntggcnatccttcacttccgagcgctcaaaccagacgtgtggncnggccttcaccatggntctctgaatcacacccatgagtcccccgtgcacttgacccaccatggcataatanccatcgctggccaagatgatcacatcgatcggtgaggnatgattggccacacagatgccaccatttcttggtctgntttccctgtcatggtaggtgatgatggctgtcagcgctcgcacgcagatccggtaacacattaactgaacatgtttactcatgaactccttaaacctcccatttggcangtatcccaccacagntgtgcccaccaccagaaggctaatccctgtgaaagccagtgctatcctgagcggcancagaaagcagt

SEQ ID NO: 135 - DNA, 617 bp, Homo sapiens
  misc_feature (1)...(617): n = A,T,C or G
actgctttctgctgccgctcangatagcactggctttcacagggattagccttctggtggtgggcacaactgtggngggatacttgccaaatgggaggnttaaggagttcatgagtnaacatgtncacttaatgtgttaccggatctgcgtgcgagcgctgacagccatcatcacctaccatgacagggaaaacanaccaagaaatggtggcatctgngtggccaancatacctcaccgatcgatgtgatcatcttggccancgatggctattatgccatggtgngtcangtgcacngcggactcatgggtgtgattnagagagccatggngaanngcctgcccacacgtctggtttgagcgctcggaagtgaatgatcgncacctggtggntaananactgactgancatgtgcangataanngcnagctggctatnctcatcttcccaganggancctgcatcaatnatacatcgntgatgatgttcaaaaagggaagttttgaacttggagccacagtttaccctgatgctntcaagtatgaccctgaatttgncgatgccttctggaacagnagcaaatncngtatggngactancctcggncgnnancacgc

SEQ ID NO: 136 - DNA, 610 bp, Homo sapiens
  misc_feature (1)...(610): n = A,T,C or G
cgtgccgtaggccggaatgttaccggctgttggatctgcggatgaggaggaggatcctgcggaggaggattgtcctgaattggttcccattgagacgacgcaaagcgaggaggaggaaaagtctggcctcggcgccaagatcccagtcacaattatcaccgggtatttaggtgctgggaagacaacacttctgaactatattttgacagagcaacatagtaaaagagtagcggtcattttaaatgaatttggggaaggaagtgcgctggagaaatccttagctgtcagccaaggtggagagctctatgaagagtggctggaacttagaaacggttgcctctgctgttnagtgaaggacagtggccttagagctattgagaatttgatcaaaagaaaggggaaatttnattacatactggtagagacnctggattanccngaccctggtgccantggcttntantgttttgggttgaagcttnaattagggnnngtntttaacttggagggttnttacttttgggggttcaantttgggttaaacttttnncnaaaaaaaccttgangccttnttaatgannnttttngcaagttttttgccanagccttt

SEQ ID NO: 137 - DNA, 645 bp, Homo sapiens
  misc_feature (1)...(645): n = A,T,C or G
acaattccaagtgcttatagccaatataagcatatttcatattagaaatagttatccatatgttaacaagaaactatggtcctcaaatatgccaattttagagtctaataactactgatagtaactatgtaaatattttggaataaacagttatttacgcaagccacacttcagctgagatgatcactagacatctgtttccagagcttcaacaatgtgtgcagcagaaggacgatctttagggtcttcattagtgcatacagagaagagttcaattactttctggtatgattcatccagttcttccatattaataggtggcctagttcccaaggctgcatagtatgcttcatcatcaaaatcactttcatcaaaagttttatcttcatcatcatcatcatttgaaagattaatgtgtggaaatccgataaaagtcatcatttcccacaaagtaagggccaangccaaatatgtctggcctggccagtaataacacccattcttcttcacaggnttcttttggggttncaatggnttctgggnccaatggtaaccaggncctaangggtcaggtcccgggcataattttcaatncccngggganaaaaagacctcctaaanttnccagaatttnaatnggttcna

SEQ ID NO: 138 - DNA, 612 bp, Homo sapiens
  misc_feature (1)...(612): n = A,T,C or G
ggtactcctggtcacttaagatctgatactgaacattctacaaatgaagttgggactttatgtcataaaactgatttaaataatcttgaaatggccattaaggaagatcagattgcagataactttcaaggaatatcaggtcctaaagaagacagcacaagtataaaggtaattcagaccaggattcttttcttcatgagaattcgttacaccaagaagagagtcaaaaagaaaatatgccttgtggggaaacagcagaatttaaacaaaagcaaagtgttaacaaaggaaaacaaggaaaggagcaaaatcaggactcacagacagaggcagaagagctacgcaaactttggaaaacccatactatgcaacaaactaaacagcanagggaaaatattcaacaagtgtcacaaanagaagctaagcataaaattacatctgctgatggacacatagaaaggtctgcacttttaaaagaaaagcanaggcatcgattacataagttcttgggtcttagagttgggaaaaccaatgaggaaaaccgtttggatnttaaggccaggtgctaccaatgccaccgtntgccngagggttaagaaacctnaatnttgg

SEQ ID NO: 139 - DNA, 592 bp, Homo sapiens
  misc_feature (1)...(592): n = A,T,C or G
ggtactccacttcttcctattggaagattaacattatttaccaagaaggacttaagggagtaaggggcgcagattagcattgctcaagagtatgtaaaaaaaaaaaaaaaaaaagaaccaaaccactggaaataatcaaatgcaaaaaggtaacaaattcataactggaaagcaaagagaagaacaagtatgatttggatgataaagcattgttttaatggtgaaaacttcacagatcactaatgtttctagaggttaacttcaagtgggcaagctggggtttttaggtagtcagtggcctagttcctaaagccacagtataggatctgttaaactgaatgtctgttgaaagtttggtttagctgcttggaggcttccttttaagacaaactgtatgtgattaagttgtttttgagggaactgaagacctgatgtacccctggccagataactgcctgattctcagatattattctctgggaaacatctacatacacaggagcttaaantggcattatctcttgcctaaattcagagatnttttgnacttgccggnggccgtcnaanggcgaatccgcacctggcgccgtac

SEQ ID NO: 140 - DNA, 618 bp, Homo sapiens
  misc_feature (1)...(618): n = A,T,C or G
ggtncttacacgtaagattttagcctatggtcattttataaagatgactgttaggatttaattcacatttaaagaaaatgagattcgttatattatggtgtttttatgacctataaaatacttacccctacaaatttccataaatgtagtggttagtaaagcttttttcttactgaaaaataatgccaggtaaccaagtattattccttccatcatttatttaggaaaaagttttatgtattagggtaaagtggtagaagttaacctagaatctaataatctccaatcacccattcctgatctaataagtagccatgagaaaaaatctctagaaagaatcatacctctcaaaaaataaaatatnaaacaaaggctgggtgcagtggctcacacctgtaatctnagcacttcccngaagttgaggtgggcagatcgcttgagcctaggcatatcgcttgnagcctgggcaactgtggccaaaccggtcttntaccaaaaaaatcncnaaagtagcccggccttagggccataccacctngagcccaggganggtnaagnctaccttggancngtgattggancctgcccnggtggncgttcgaaaagggcnnaaatnnt

SEQ ID NO: 141 - DNA, 551 bp, Homo sapiens
  misc_feature (1)...(551): n = A,T,C or G
ggtacttcaaactctcttaacggtgatgctctgacattcactactacatttactctgcaagatgtatccaatgactttgaaataaatattgaagtttacagcttggtgcaaaagaaagatccctcaggccttgataagaagaaaaaaacatccaagtccaaggctattactccaaagcgactcctcacatctataaccacaaaaagcaacattcattcttcagtcatggccagtccaggaggtcttagtgctgtgcgaaccagcaacttcgcccttgttggatcttacacattatcattgtcttcagtaggaaatactaagtttgttctggacaaggtcccctttttatcttctttggaaggtcatatttatttaaaaataaaatgtcaagtgaattccagtgttgaagaaagaggttttctaaccatatttgaagatgttagtggttttggtgcctggcatcgaagatggtgtgtcttttctggaaactggatatcttattggacttaacccgatgatgagaancgcaaggtaatttatatagtacctgc

SEQ ID NO: 142 - DNA, 601 bp, Homo sapiens
  misc_feature (1)...(601): n = A,T,C or G
cgaggtacatggtctatgcctcccaggagacgttcgggatgaaattgtcagtgtaaaaccagaaaaaatgcatctcttctagaattgtttaaacccttaccaaggaaaaaaaaggggtgttaccaactgagatcgatcagttcatccaatcacagatcatgaaacagtagtgttcccacctaggagtgttgggaagttgtgtttgtgtttcaagcagaaaaactgagctccaagtgagcacattcagctttggaaactatattatttaatgtgggctagcttgttttcaaattttaaaagtttaaaaataaaatactttgcattctaagttgccaataaaatagaccttcaagttattttaatgctcttttctcactaataggaacttgtaattccagcagtaatttaaaggctttcagagagaccctgagtcttctcttcaggttcacagaacccgccgnctttttgggtagaagttttctactcagctagagagatctcctaagaggatcttttangcctgagttgtgaangcaccncngcaaacgcattgccttccanttggcacaaacnccggtnaacggcttgtgttaaaaaccgc

SEQ ID NO: 143 - DNA, 515 bp, Homo sapiens
  misc_feature (1)...(515): n = A,T,C or G
ggtnncgtaaagaatatatcttatctggagctcagcctcaatcatgtcttaacaaaatgacaggtctnanaaagggggagctcaatagctcaaaagtgacaagtccttttcacagcaccgttctcagaacacctctgagtaacgtgtttgccagtagctattctcactgatgcactgatggccctgaagaagcggatccagtcacataggaaaggaggctgtgttagtgaaagcacatggaaggtgttgntttagaaaggtagtcaggaaaaacattcaggaatagatttatacaccattattgnattatttntaaattttcattcactcttctgtttggatacttttgctaattaaccgtcctatgttaatanccaccaaagctataagtccatagtcagtaaaacattccccttgggctgtctgagctaaaagcantggcatctccgnatgtnggacatccnagaaatagnttggtacctgcccnggccgnncgttcttaaggctaatccngg

SEQ ID NO: 144 - DNA, 436 bp, Homo sapiens
  misc_feature (1)...(436): n = A,T,C or G
ggtaccgctcaggattcccatcccaagacacccggtccttaaaccgcccactcatgggttggaagggatctatgtggtagtagaatacaaactgctcaggtcccccgtctagaggacgaaaattccaggtcactgttagagcatcacccacaggggcaaagctggagaaagtgcattttaaccgagcatctgtcccattaacagcctccagcacccgggaggtataaatttccacagctgctataggccaaagagctgtgagctgtatgccaaggagaagaagcaccgcacgagtagagctcttgccatacatgagggaaacccagccttggccccagagaccggacggggcagaccgagggctccaacaccctgccaaggccactccgggaggagcaagcaccgcgttttnccagagagaggagtttgagttgag

SEQ ID NO: 145 - DNA, 441 bp, Homo sapiens
ggtacatccccactatcatccgccgggatgacccctccatcatccccatcctctacgaccatgagcacgcaaccttcgaggacatccttgaggagatagagaggaagctgaacgtctaccacaagggagccaagatctggaaaatgctgattttctgccagggaggtcctggacacctctatctcctcaagaacaaggtggccacctttgccaaagtggagaaggaagaggacatgattcacttctggaagcggctgagccgcctgatgagcaaagtgaacccagagccgaacgtcatccacatcatgggctgctacattctggggaaccccaatggagagaagctgttccagaacctcaggaccctcatgactccttatagggtcaccttcgagtcacccctggagctctcagcccaagggaagcagatgatcgagacgt

SEQ ID NO: 146 - DNA, 624 bp, Homo sapiens
  misc_feature (1)...(624): n = A,T,C or G
acgtctcgatcatctgcttcccttgggctgagagctccaggggtgactcgaaggtgaccctataaggagtcatgagggtcctgaggttctggaacagcttctctccattggggttccccagaatgtagcagcccatgatgtggatgacgttcggctctgggttcactttgctcatcaggcggctcagccgcttccagaagtgaatcatgtcctcttccttctccactttggcaaaggtggccaccttgttcttgaggagatagaggtgtccaggacctccctggcagaaaatcagcattttccagatcttggctcccttgtggtagacgttcagcttcctctctatctcctcaaggatgtcctcgaaggttgcgtgctcatggtcgtanaggatggggatgatggaaggggtcatcccgcngatgaatagtgggggatgtaccttggccgngaacacgcttaagggccaattccannacacttgccggccgttactaaagggatnncaactttngnaccaaacttggcnnaaacaatgggccnaacttggttccntggngaaaatggtttcccntcaaattccccccaanttacnaccggaaccttaaagggaaaaccttgggg

SEQ ID NO: 147 - DNA, 599 bp, Homo sapiens
  misc_feature (1)...(599): n = A,T,C or G
cgaggtacaagcttttttttttttttttttttttttttttcttttttttttttttttttttttttttttttttttttgaacncanatcantttattggcatggntttgtttnaaaaaaaggaaaagngncaaanccaaaanacanactttgntaacaaatncctgggggnggctggacntttttgcctaatgctgngcaaanagggggatcctggcccanacatccngctgattccttggnacaaggttgtntgcctgggcctaantgcncctttttgaatacttgnttgcaaaccacacnttccantttaatttccaggggcagntnatnaccctnnatccactgggtccagccacgcccntcnttttaacccttttgcanacactggagcttgntccgtcccagntcactgnngnatgcncttgcggncatttatgcctgtcaaacctctaaaactcnttcccacctggaagccatggangtagttcctaaaaaggctcaacgngccgaagaacaanatgggccccggcctggacaaaactttttggcngggttaaacaagttggcnattttcccaaggnccanttgcctnnnggcc

SEQ ID NO: 148 - DNA, 609 bp, Homo sapiens
  misc_feature (1)...(609): n = A,T,C or G
ggtacttaagtaatccaaagctcgatcctgatctgcatgaattagcatcataaatgcattccttttgcaacttgcatccttctcattcaccagaaaatcatgtatcagttcaggagcatcaggtataagatgttcaaaatttctatagatggtatagatggccaaaacagcatttcttctaacatagctgtgtcgatgctccaaacatgcacgaatagctggcattaaaggttctagcaattctgcttctttcaatttgcaaagaaaacgaagagtagatcctcgaataaattcattaggatgttgaagatcctttctgtatgcatcacatacaaggatcatctcatgtaaaagtctcccatctggagttgttttaggaacaatttcccaaaataccagaagtaatttcttgatagtgtgatcctgaagaaggtagcacanaacgaatggatggtcatcagaaagtncaggaagtttttcaccaattcagaatcataatggattacctttcttcaaagcttcagtctttgactttacttcttcctttttctaaaatcattttttaagcttaatttccaaatgggngggtcttgaatccatgggcncgtn

SEQ ID NO: 149 - DNA, 589 bp, Homo sapiens
  misc_feature (1)...(589): n = A,T,C or G
actcaggtagaaccatcatgaaaatgacccacagtgaacttatggaaaagttcttaacagattatttaaatgacctccagggtcgcaatgatgatgacgccagtggcacttgggacttctatggcagctctgtttgtgaaccagatgatgaaagtggctatgatgttttagccaaccccccaggaccagaagaccaggatgatgatgacgatgcctatagcgatgtgtttgaatttgaattttcagagacccccctcttaccgtgttataacatccaagtatctgtggctcaggggccacgaaactggctactgctttcggatgtccttaagaaattgaaaatgtcctccgcatatttcgctgcaattttccaaacgtggaaattgtcaccattgcagaggcagaattttatcggcaggtttctgcaagtctcttggtctcttcttcaaagacctggaaccttcaaccctgaaagtaaggagctggtagatctggtggaattcacgaacgaaatcaaactctgctgggctcctctgtanagtgctccacccagtgattggcctagacactctgggagcaactggccccc

SEQ ID NO: 150 - DNA, 353 bp, Homo sapiens
ggtacaaagaaattttggatagcaaaataaaggaatctttacccatagatatagatcagctatcaggaagggacttctgccattcaaagaaaatgacaggaagtaacactgaggaaatagactcaagaatccgagatgcaggtaatgatagtgccagcactgctcctaggagcactgaggagtctctttctgaagatgtgttcacagaatcagaactttcccctatacgagaggagcttgtatcttcagatgaactgcgacaagataaatcttctggtgcgtcatcagaatctgtgcaaactgtcaatcaggctgaagtagaaagtctgacagtcaaatcagaatctactggt

SEQ ID NO: 151 - DNA, 492 bp, Homo sapiens
  misc_feature (1)...(492): n = A,T,C or G
ggtacctactggtgctgaaaaaaggaaaattccggcttgaaggaaaggagtttagaactctgaaaatttggtgacattgtttttccctgaaagaaatgtgtgttggatttaacagatgaaattatctgccctccaaaagtcctttagaagagccagtgcaaggctgaagaccaaagcgtcaagaacacgccagactctcagcttcctctgctttgctcctttgttgaggaaatgcaaatgcaaagagcttcccgttaaaaacaaggagtgtctgagagccacgtgttcaacacgcttctcctgctgctgacccctctgcacctgcagaggcagtgagcacccaacaggtggcgccaaggcgcccgtcacacgctcacgtcctctggccagcagccacgtttattgaaggagtgtggcactgcccatcattggatatgccctcggccatgaaggattccagtggttcacgctgnccagtatatacaaaaatgt

SEQ ID NO: 152 - DNA, 597 bp, Homo sapiens
  misc_feature (1)...(597): n = A,T,C or G
ggtacataagcctaaacaatttcacctaggtaaaatattgatgtcataaccaaactatatggccccgtttcataaaggttactatattctatagagagtgaagaggtggcctttctatcccagcttaccctattcttgttattgttcaaattctcctgaagcttgcataactagctgccatcaggtaaatgctattggctagcagaagactgcagttctgttaatattagaaccagcagggggaacttgggaacttgacattaaaaatctagaaacagaattttaggatgggtctcgttagaaacctgaattgttaatggacttaagtaaaaaccatcccaaagaatttgagctttaaggtgataaccgtcttttcagagatcatagcacatgaagaacccatggacactacacagactatgaaccggtagcagaaaaagatctcgtgactaaagtgggggatgacagcaaaaaaaaaaattaccaaaggaaaaaagttgagaatncaggaatattaccagatggtaaaaaatattatcttangccaaatgaggcccttcggattcccaaaccttgcttcttctcctttcgtcttgn

SEQ ID NO: 153 - DNA, 596 bp, Homo sapiens
  misc_feature (1)...(596): n = A,T,C or G
actggttgctacccattttttcaagtctaggtgatggctgctcctttccaacttgccttgttaaccaggatcctgaacaagcatctactcctgcagggctgaattccacagctaaaaatctcgaaaaccatcagtttcctgcaaagccattgagagagtcccagagccaccttcttactgattctcagtcttggacggagagcagcataaacccaggaaaatgcaaagctggtatgagcaatcctgcattaaccatggaaaatgagacttaactcttcaagcaagataaattcatactttataaaagtatcaatgctgtagatggatggaagaggcttcccacaggaaggtgccaccagtcagtttgtgcctatgtccctttggctggaaatgcagaatatgaattgattaagttctcttccaagccattgcttaaaatataacatgttttgggatccaatacacacattggtacaactaacacaaattcctattaaatattaaaagtagttctgggttattaatcaacggggaaaacattttttccaaaaaaacttggaataaatccanggaccagttttancccaatatttggg

SEQ ID NO: 154 - DNA, 297 bp, Homo sapiens
ggtacccagtttcaaagctctctggttttttctaagaaatgaagcaaggataggaaccccttctcccagaacaggcctcaaatctatcttcaaaggtgacccagcaatcagtgtcaatgcctttactgtagttaacctggtaatttcattctttagtctctccaagaaaatctgaagtgtattaggcaagtcagaacccaaattgtctccaaggttgcaaataatttgtcccatacaggaaatagccctttccttgacttcctgatcaatgtcagctgcttttaatctcttaatggt

SEQ ID NO: 155 - DNA, 594 bp, Homo sapiens
  misc_feature (1)...(594): n = A,T,C or G
ggtacttgaaggagaacagtttacatcgggcgttagccaccttgcaggaggagactactgtgtctctgaatactgtggacagcattgagagttttgtggctgacattaacagtggccattgggatactgtgttgcaggctatacagtctctgaaattgccagacaaaaccctcattgacctctatgaacaggttgttctggaattgatagagctccgtgaattgggtgctgccaggtcacttttgagacagactgatcccatgatcatgttaaaacaaacacagccagagcgatatattcatctggagaaccttttggccaggtcttactttgatcctcgtgaggcatacccagatggaagtagcanagaaaagagaagagcagcaattgcccaggccttagctggcgaagtcaagtgtggtgcctncatctcgtctcatggcattgctgggacaaggcctgaagtggcagcacattcagggattgcttcctcctggtatgaccatagaatttggttcgaggcaaggcactgtcaaagatgtggaagaagaaaagtttctacacactgagcaggcttataagttnggcagaaan

SEQ ID NO: 156 - DNA, 294 bp, Homo sapiens
acaggatgcagtttctcagctggattctgagctgatggacataactaagctttatggggaatttgctgacccatttaaacttgcagagtgcaaacttgcaataattcattgtgccggttattcagaccctatattggtgcagacactttggcaagatatcatagagaaagaattgagtgacagtgtgacattgagctcctcggatagaatgcatgctcttagtctcaagattgttctccttggcaaaatttatgctggcacaccacgcttctttcctttagattttattgtacc

SEQ ID NO: 157 - DNA, 527 bp, Homo sapiens
  misc_feature (1)...(527): n = A,T,C or G
ggtactgattgtcatcctgactttggcattggcagctcttatattccgacgaatatatctggcaaacgaatacatatttgactttgagttataatatggttttgtgacttatgagctgtgactcaactgcttcattaaacattctgcattgggtataatctaagaattgtttacaaaaagattattttgtatttacccttcattcctttttttgatccttgtaagtttagtataaatatatctagacattcagactgtgtctagcagttacgtcctgcttaaagggactagaagtcaaagttccttgtctcactatttgatctgctttgcagggaaataacttgntttttctcatgtttcatcttctttttatgtaaatttgtaatactttcctatattgccctttgaaatttttggataaaagatgatggtttaagttccaatgagtattactaggtactcaataccacttattggagtcctggcccngggcgggcgnttcgaaanggccaaatncagcaccactg

SEQ ID NO: 158 - DNA, 617 bp, Homo sapiens
  misc_feature (1)...(617): n = A,T,C or G
ggtactgaaaaagaggcgtgaggtgctccctgtggatataaccaccgctaaagatgcatgtgtcaacaacagtgctctcgggggagaagtttatcgattaccgcctcagaaagaggagacacagtcctgccctaacagtttagaagataacaacttgcaattagaaaaatcagtttctatacacacaccagtagtcagtctctctcctcacaaaaatctgcccgtggatatgcagctgaagaaggaaaagaaatgtgtgaaactcataggagttcccgctgacgctgaggccttaagtgaaagaagtggaaacacccctaactctcccaggtcagtgtcctcttttcctccaggcagccagcagacctctccatctctcctctctcgctgcatgaactgtgctgnctgnttctttatctactttcttacaattgcatgcagtataattcctcagtttcatctacctaccttcaacttttncagaactttaagaaagacttaaactgattgcaangggaaaggactcttggaataaggcaatcncattaaaaagttacncgtttctgggttcatgaaagggatntcncagtttaccccatntttgaaaggtttatnng

SEQ ID NO: 159 - DNA, 1002 bp, Homo sapiens
  misc_feature (1)...(1002): n = A,T,C or G
ggtaccagcttacctatttgattcagttgctgttttctcactctctatatccatttgaaattgatttattttagatgttgtatacttacgttaggctttctgttaatagtggtttttctcctgttgacagagccaccggattatgacacaggatgaggaagattaaggataatcaattgactaatttcatttagaatattatcaaacatttcaactaggtatcagaaaaaggctttctttcataagactattttaaatagaaattatttcaacaattaaagtaatgttgaccatccccctctcagctgaataaagaaaaatttagttcaatttattgcaatttaattacaatactaccttcacaacattttcatgtgttttaaataaatattttttaattggctaaaggacattcaagcaaagaaatgctttctttacttaaaatgtctatctcatttgctgctttttcactaagcctttactttgttaataaaagtgtccattgtgtgatgtttttgattttacagtttgctaaatcttattttcttggagttgctttttggtaacagctccattgctactccccattttattggtttacatcaatgcatgcttcgttgtgatccctcaagatgtaacacttggtatgctcggntgaggatatgaaaaaatactttccgaaaccagggaattcagtggatgnttggtttatctggttggataagaaaagtagggnccagccttaagcagnacagaagccnctggtanaagcatagtcagggaactttttttaattcntttangnctaagggncaggagtggattnnaaagggaggagagcccttattatggcctatnccccgntttggagaaganccttactgggaacctggcccggcgggccgttcaaaagggcgaaattccgncacctgggnggccggttcttaaggancccnacttgggcccaaannttggggaaannnggggcnaaannggntcccg

SEQ ID NO: 160 - DNA, 434 bp, Homo sapiens
  misc_feature (1)...(434): n = A,T,C or G
ggtacaagtcatcanggtcagcattctcccactttcaagtgcactaacaaggctgctgggatttccactggagtgtcaacagcagtattcttgttgcaggaactctcagaatttgggggtccataacaggtttagcctatgacccaggtccaaaagttccagccttctctgccacctccagagctagcttcaggttctggtcaaagagctcacacctgataggcatttctaaggaatagaatggattcttgagggcaaagtctgagtaaatctcataaatctttcggagaagagaatctattccagcttgcctaggatctgctagaaccacaaacttgatccctgtcagtgtctggtagcagtgcaatttgaatgtgtctgtctncagcatctcaatgcctgagcttncctgttcangagacagntggnagcca

SEQ ID NO: 161 - DNA, 652 bp, Homo sapiens
  misc_feature (1)...(652): n = A,T,C or G
acagactccaagggaagactgggctccaaagccacatgcctttgttggcagcgtcaagagtgagaagacttttgtggggggtcctcttaaggcaaatgccgagaacaggaaagctactgggcatagtcccctggaactggtgggtcacttggaagggatgccctttgtcatggacttgcccttctggaaattaccccgagagccagggaaggggctcagtgagcctctggagccttcttctctcccctcccaactcagcatcaagcaggcattttatgggaagctttctaaactccaactgagttccaccagctttaattattcctctagctctcccacctttcccaaaggccttgctggaagtgtggtgcagctgagccacaaagcaaactttggtgcgagccacagtgcatcactttccttgcaaatgttcactgacagcagcacggtggaaagcatctcgctccagtgtgcgtgcagcctgaaagccatgatcatgtgccaaggctgcggtgcgttctgtcacgatgactgtattggaccctcaaagctctgtgtattgtgccttgtggtgagataataaattatggccatgggaaacaaannanannnnnnnnnaaaaaaaaagcttgnaccttggccgngaccacgc

SEQ ID NO: 162 - DNA, 638 bp, Homo sapiens
ggtacttgaagatttgcataaagccaacattcgcaccgtcatggtcacaggtgacagtatgttgactgctgtctctgtggccagagattgtggaatgattctacctcaggataaagtgattattgctgaagcattacctccaaaggatgggaaagttgccaaaataaattggcattatgcagactccctcacgcagtgcagtcatccatcagcaattgacccagaggctattccggttaaattggtccatgatagcttagaggatcttcaaatgactcgttatcattttgcaatgaatggaaaatcattctcagtgatactggagcattttcaagaccttgttcctaagttgatgttgcatggcaccgtgtttgcccgtatggcacctgatcagaagacacagttgatagaagcattgcaaaatgttgattattttgttgggatgtgtggtgatggcgcaaatgattgtggtgctttgaagagggcacacggaggcatttccttatcggagctcgaagcttcagtggcatctccctttacctctaagactcctagtatttcctgtgtgccaaaccttatcagggaaggccgtgctgctttaataacttccttctgtgtgtttaaattcatggcattgt

SEQ ID NO: 163 - DNA, 1002 bp, Homo sapiens
  misc_feature (1)...(1002): n = A,T,C or G
acatataaatatatatataaaatgaacatagttcatgctttcagataaaatgagtagatgtatatttagattaatttttttagtcagaacttcatgaaatccacaccaaaggaaaggtaaactgaaatttcccttggacatatgtgaaatctttttgtctttatagtgaaacaaagccagagcatctttgtatattgcaatatacttgaaaaaaatgaatgtatttttttctccaaagaacagcatgtttcactcaatggtgaaaaggtggaaacatttatgtaactttatgtgtatctgtcttgatatctactgacattgtctatatgaggaaaatgattactggtcatgctcctgtgagttttttgggaaggtagggtcatttctccctgcctgctttgtgccaactagcatgttgcatctacatgcattatgagtctggttaggcattactttaaacatacataaagagacagtaggacattgtggctgagtctacccagctcaaggtaaaggagaatattgctaattttttagcaaactagaccagcattattactcaaactaaaaatatcacacctgaaaaatttaatttaggacctaaaatgtctagattagctttctgctttttttatttgaataactcattcagttgtgaatgaattcctctttaattggtgccacagtcaccaaatgacaaggatttgccactttccccccaaatnggagtgcttgtaatttaggctctctaccntnaaatcagtntaagggaaccgtaattatgatggattttttccaagatgaccagctggggtgaaaaccatttttctttggccaatggcaaaactaataagctttaaaaacttcccctttatggggaaagttttaaaactgggaaaggttangaaccnaccngtggaaanccntggaagggaaaaaaanaaaggggnccttggnccggaacacccttaaggggaattcancccattgggggccnttcnt

SEQ ID NO: 164 - DNA, 572 bp, Homo sapiens
  misc_feature (1)...(572): n = A,T,C or G
acagcatgcatttacaaccagcgctgatctagtctattttgtcatataaacttgaatacaaaaatccaatttaaataagactagacttactataatagtaaacaaacaaaaacaaaaaacaaaaaaaaaaaacacacacagtagacttagtttgatactgattaattttaagagtaaactcatcctgtcccctcttaatactctactgcaatttattgatggctagaatatttactgacttaaaaaaggtattaaatacttgtatcatgaaattacattcttattaacaataagacatactgtgtaagaaaatagctcatgtgtgaaatgtgtctgaaatgcattttttccttacaactatcanaacatccactcacactaaaatgaaaccactcccaaccccccctgaaaaaatgttnagggaagacngggtgggctgggggaggagcaagggaaggaaaagatttagctatactaattacagcacagtgattaacaatgggtcaggacagaaccaacagaattnggcaaaaaanngccctttaaacatggntaccattaaaaaccaacnn

SEQ ID NO: 165 - DNA, 594 bp, Homo sapiens
  misc_feature (1)...(594): n = A,T,C or G
ggtactggcctcctggcactctgctttttcactgactggctactgaagagcaaggcagagctgggtggcatctcagaactggcatctggacctccctaactgggccccgctggtcccatttgctcattagaatttcctctcacatcagtgggatacagaattcagtttctcccttgccaggtccttgggatggttgacccctgcctctgcagtagccttttgtgagtctgctaaggtagctctcacacacctcggctctggggttgatacctgagcctacaatagagccctgaaatcaagagcatagcttgagtgtgtgaatatgatgtgtgcacatgcttaatgagcgtgcaagtgtgcacacgtttgtggagaggagggtgttctggcctgagaaggtaaagaagaggcatgtccagtatgctttgcagggtgtgtttgctcttttccatgcccatgcaacccagattggggtggagcaggaaggagctcttttctgttcccaagcctcagaactcttgagctgtggcttacttgctggcttcatcaggttcaagctncgtgggccacactgctgctgngccaagaaggtgt

SEQ ID NO: 166 - DNA, 434 bp, Homo sapiens
gcgtcgcggccgaggtactataatggtccccatcttaatttgaaagcgtttgagaatcttttaggacaagcactgacgaaggcactcgaagactccagcttcctgaaaagaagtggcagggacagtggctacggtgacatctggtgtcctgaacgtggagaatttcttgctcctccaaggcaccataagagagaagattcctttgaaagcttggactctttgggctcgaggtcattgacaagctgctcctctgatatcacgttgagaggggggcgtgaaggttttgaaagtgacacagattcggaatttacatttaagatgcaggattataataaagatgatatgtcgtatcgaaggatttcggctgttgagccaaagactgcgttacccttcaatcgttttttacccaacaaaagtagacagccatcctatgt

SEQ ID NO: 167 - DNA, 395 bp, Homo sapiens
acaaagttaagtttagcccttttctagaaagtgatctttaaaattaaaattgctcctcttttaaattcaccaaatttatgtgtgggaaggcaccaaaatgattttgtaagtgccactgcaatattccctttcaagtgtggcctaaatttcaatcttaaggatggaatgcatgtctgctccttgttctgaaaaatataggcatctactacattttaaaacacagtgaaacatatacataagcctataaaaaaagatttgtgcaatttgaaagcctgttaattttttatgtagacatacctacacacgaaagggttaaattcacagccttactagttccttgcttccagtatttcaattggtctcctcccctcattattattattactactagtacc

SEQ ID NO: 168 - DNA, 683 bp, Homo sapiens
  misc_feature (1)...(683): n = A,T,C or G
ggtacggtattctaatcaatgcatttgaaaagtcagcaaaagcccacattaattcctattacgcttgtttcttggttcaatctcagcactttcagcggctcttgtgcggcgattctgtcttggacttatttctgtgtcttgaagatcgtttttatgtgatgcttcccaggcttcctcttcttctaaaagatctcttatgatgtctgaactggaactattgcatgaatctgattctgatgaagaaagaacttcttgaatatcaatacagctagaagaatcctcttctctgtcaggttccaattcctctggggagtccagctttgattgagaaaagtggtttgttactgaggtcatattatcttcctgtcccatgcatacagaagatagcttttctgtagattcatcttcttttgttattgttactgttttttgtgacattccagcaattttcttgtatccttttctagcctgatccaccagaagctgaaattcactcttatgttttttacgatatttactgtggatttcatctatttccttttctgnttggtcctttgtaaaaaccattacactttcattgagtttactagcttcaagacgcatcctagtcttctctatattttcgatttctcgaactatttcagcagctgatttaggatgcaaagcatcgcattgggcattgt

SEQ ID NO: 169 - DNA, 408 bp, Homo sapiens
  misc_feature (1)...(408): n = A,T,C or G
ggtacctttctgaccacaatgaaataaacctagaaatcaataacaagaggaacttttaaagcagcacaaataaatggaaattaaataacatgattctgaatgaccaatgggtaatgaagaaattaagaaacaaaatttaaatgtcttaaaatgagtgaaaacagaaacacaacatataaaaatgtatgggatgcagcaagagcagttttaagagggaagtatttagtaataaacacctacatcaaaaacaagaaagatctggctgggcaaggtggctcacacctgtaatcccagtgctttgggagcccaaggcaggaggacgacttgatgctgggtcaagaccagcctgggccatatatatagcaagaccttatctctaaaaaaaaaaaananaaaaaaaaagcttgt

SEQ ID NO: 170 - DNA, 566 bp, Homo sapiens
  misc_feature (1)...(566): n = A,T,C or G
ggtaccaacacagccaaagactgtaagaaggtagctgaagtcctctgccaaataggattgaaaagctaaaatctttctctgtttctttcttaagtaacaactggtctattcaagctcaaccagagcatataagagaaaaaactgactaacgagggggtcttaaagagctttgaaggacagtttctagaaagtagaaagatcactgagtaaattactgcacctcctctaccccacaaaaaaaagggtgaggatgaatgtaaaagtgtagagcaagctttcagacaacttcaagtttgtttttggcgcttccgtttgtaagcaatcaagatggtgagagacgctatcccaaagaagaaagtctgtaggaaccagagtagctgagcccgaccacttgtgatgcctttatgcttgcacaatactatggcatacaaggactctnccacatgaatcagccaggcaagccaatacccattgcaaagganggtgtgatgggngggcaccaagtacctgtccgggcggccctttaaaaggggaaattccccacttgggggcgggntttagggnac

SEQ ID NO: 171 - DNA, 562 bp, Homo sapiens
  misc_feature (1)...(562): n = A,T,C or G
ggtacctttgcaagcaggtggccagtaaagctgaggagaatctgctcatggtgctggggacagacatgagtgatcggagagctgcagtcatctttgcagatacacttactcttctgtttgaagggattgcccgcattgtggagacccaccagccaatagtggagacctattatgggccagggagactctataccctgatcaaatatctgcaggtggaatgtgacagacaggtggagaaggtggtagacaagttcatcaagcaaagggactaccaccagcagttccggcatgttcagaacaacctgatgagaaattctacaacagaaaaaatcgaaccaagagaactggaccccatcctgactgaggtcaccctgatgaatgcccgcagtgagctatacttacgcttcctcaagaagaggattagctctgattttgaaggtgggagaattcatggccttagangaagtaaagccangagcccccaaatgtcttggacnaacttctcaataactggcttttgagctgtacctgtcccgggngggcnctttaaaangnnnaattn

SEQ ID NO: 172 - DNA, 617 bp, Homo sapiens
  misc_feature (1)...(617): n = A,T,C or G
acggtagaactgctattattcatcctatgtgggtaattgaggagtatgctaagattttgcgtagctgggtttggtttaatccacctcaactgcctgctatgatggataagattgagagagtgaggagaaggcttacgtttagtgagggagagatttggtatatgattgagatgggggctagtttttgtcatgtgagaagaagcaggccggatgtcagaggggtgccttgggtaacctctgggactcagaagtgaaagggggctattcctagttttattgctatagccattatgattattaatgatgagtattgattggtagtattggttatggttcattgtccggagagtatattgttgaagaggatagctattagaaggattatggatgccgttgcttgcgtgaggaaatcttgatggcagcttctgttggaacganggtttattttttgggtanaactgggattaaaagctacatggttaattctaaggccactcaggntaaaaaancnngcgagcttaaccctttgaaaaangnggcccccntggcccgaaacncccttaaggggcaattccancaacntggnggccgttattangggatccgacttgggcccn

SEQ ID NO: 173 - DNA, 232 bp, Homo sapiens
ggtaccagatgctagctgggcctggtgggtatccacccagacgagatgatcgtggagggagacagggatatcccagagaaggaaggaaataccctttgccaccaccctcaggaagatacaattggaattaagcttttgtaaagctttcccaaatcctttcatcattctacagttttatgctatttgtggaaagatttctttctcaagtagtagtttttaataaaactacagt

SEQ ID NO: 174 - DNA, 987 bp, Homo sapiens
  misc_feature (1)...(987): n = A,T,C or G
gcggccgangtacttcaccatcactgactccatggacttgatcagccgccgctggatgtatccagtctcagcagtnttgacagccgtgtcaatgagcccctcacgaccccccatggngtggaaaaagaactcagtgggtgtgaggccggctaggtaggagttctccacaaagccacggctctcaggcccgtagtcatccttgatgaagtgaggcactagtccggtgcttgaagccaaatggaatccgcttgccctcgacgttctgctgtccaacgacagcgatgacctgggagatgttaatcttggaacctttagctccggacacgaccatanacttgaagttgttgtattcanacagggatttntgagcagaggagccagtcttgtctcgggcatcgttaagaatgcggttcacctgattctcaaacgtctgccgcagagtgttccctgnggngggctccagctcattgttgngngccttctcgatgacctctattacgtcctgcttgnncttcttaatagtgttctgaatgtcctggtaagncttagaatcagcantggngtcccaangcccatactttgacctatagacagggaaaaacatcagcaaacccctttggacctctaatanacatggaatggaattataaccccagagtataancangggcaccanatncaaggaggaaagaaanggatngtangacagnaagaagttnnagaantcnnnnagacggcttggaccctgnccggcnggccgttcaaanggccaattccannccactggtggccgnnacttntggaaccgncttgganccaaacntggctaaaaanggccntagcnggttcccgggcttaaatggnatncgntcccaattccncccaaattacggcccgnaanccttaancnaaaancccggggggcctnangaanggnntaacncccnttaaatgggttngccncaaggcccnntttcaantngggan

SEQ ID NO: 175 - DNA, 574 bp, Homo sapiens
  misc_feature (1)...(574): n = A,T,C or G
actccccgccccctctgaaagcatgtcacatcatgtaaatttgcttctaacatctgcttcaaactgtctctggactccaaatttggatgggtcagcctctgcagaaagtttgtgttgagatgctggaagaacagcagagcctcctgcaccctcagcaagggaccagctcccaaaggaaaggtccttgtgtgacatttggagaatcttccttcatccagacaactctactcgaagcaagacgaaagcaggatgtggcagttgcagtgagaaaggaaaggaaagatgggcagactctgctttctggaaatttcttcacaaagtagagctcatgaactctgtgctgtcttctggtaacatatcatcagtgtttgtattcatggtgtggcacatggatccatggcattgggtaaatctggtggtttttacacatggtcagaatgtgttcaaatacatctcatgatggagacagtncccaaggtaaatggttggtttcagcattttaaaaaagactcccttaacatttatctcagaatcatgagcccttcttctagttgacaatggcaatggtcccccn

SEQ ID NO: 176 - DNA, 570 bp, Homo sapiens
  misc_feature (1)...(570): n = A,T,C or G
ggtacagatattcattcaggagctccaggaaactggatttgctctctagagggcagctcaaagggcccattcactcacaatccacccaacggcattcctggcctccggtcacagcctcagccacggaagtcctgcagggtttgtcagtctgtgggggtgagtgccctaacaccatgaactgcccactgctcccagaaagaaagaagaacttggaatatgagactccccaggtctcctgaccctcttccttcttggaatgagacccaggtagtgctcaggggatttctggtgttggccatggacaagcaaccagtagtgggctcactttagggacgcaaaccacaaagcccacctcaggaagccaaatttcaactcttgccctggggcaaacttctagcaaccaggccagaggcaaatgtcagacaggataagggatgacatnccatcaatcaaagttgnaaatgggaagggacccanccagtttgnaataaaggcnttaaactnggnacctggcccggccggccgtttaaaggcgaattcacacactggngggccgtctaagggatccca

SEQ ID NO: 177 - DNA, 621 bp, Homo sapiens
  misc_feature (1)...(621): n = A,T,C or G
acagaagaggatgaagaagaggatgaagaggaagaagaagagtcttttatgacatcaagagaaatgatcccagaaagaaaaaatcaagaaaaagaatctgatgatgccttaactgtgaatgaagagacttctgaggaaaataatcaaatggaggaatctgatgtgtctcaagctgagaaagatttgctacattctgaaggtagtgaaaacgaaggccctgtaagtagtagttcttctgactgccgtgaaacagaagaattagtaggatccaattccagtaaaactggagagattctttcagaatcatccatggaaaatgatgacgaagccacagaagtcaccgatgaaccaatgggaacaagactaactatttagaaacatttaagatgccagtattttacatacaggttctggnttttaacactggattaaaactttttggngtaaataaaaaatgggaccctttaggnttttacccaggaagaaagccaaggtttggtaaaaattaaaaggtancccttggggccggggaanccacggctttaaggggccgaaaatttccaagnacaaccttggccngggcccggntancttaaagggggaatncccaagaccttnngg

SEQ ID NO: 178 - DNA, 403 bp, Homo sapiens
  misc_feature (1)...(403): n = A,T,C or G
actccttcctgagccgctgcaataagctttttgctgtggaatatgacgacagctagatactgtccctgccacaagagcttctggttataaatagacaaagactctaatttctaattgacctcttttctttttcaggtttatacataaattttcgtcacctttataaacagcgcagacggcgctatggacaaaaaangaaaaagatccactaaaaagaaagatttagatggcttcttgccagtttgagcctaatctgattcttacagttttaccttcttgaaccaatgtaaaagtttttttaatgttaaatgattaaattctcagtgaggctatcttccttttccccagtaacattcctgaatttactgntaccttattgtaagtacctcggtcgtgaccacgc

SEQ ID NO: 179 - DNA, 650 bp, Homo sapiens
  misc_feature (1)...(650): n = A,T,C or G
cgaggtacaagctttttttttttttttttttttttttttgagccaaccagctaaaggatcactgcagctaaatacagatagagaagcaacaaagccaggcaaatacccatcagagacagtgacaagagcagctgggggcacgggggaggcagaaggaagagaaagaaggggaggagcctccagagtcccagccccaaccccctctgccattggctacccttgctccccacaaatccctggggttgaagtgaggaggactacaggctggggtgaaaatacacaaggacagcccaacaaaatacaacaaggactagcatcagtctcccccttactccacccccaagaaaaatacccttattgngactagtatttatgaaaatctgtaagagactattctatgtagtggctctaatcccatatcacagcaactgcctgngttgggaacttttcaaatcagtgatttgcgggaaccaaccggattttcagcttnttacggngcatgcagctttaccaaaacttgggtaaagnccagncacatttaccttctgcttacatntaaaaagggtgangaaagagggaagggaaaaaggggttaagggctaggtaaacttactggtnagcagctanattcaccatggtcnttttttggg

SEQ ID NO: 180 - DNA, 639 bp, Homo sapiens
  misc_feature (1)...(639): n = A,T,C or G
acatacggctgtgcgatacaccagcattgaattggttggagagatgagtgaagtcgttgatcgaaatcctcagttccttgaccctgtgttgggctatttgatgaaaggcctgtgtgaaaagcccctggcttctgctgcagccaaagccattcataacatttgctctgtctgccgagatcacatggctcagcactttaatggactcctggagattgcccgctccctcgattccttcctgttgtctccagaagctgctgtgggcttgctaaaagggacagcacttgtcctagcccgattacctttggataagattaccgaatgtcttagtgaactatgttctgttcaggttatggcattgaaaaagctgttgtctcaagagcccagcaatggcatatcctcagatccacagtgttcttagatcgccttgcagtgatatttaggcataccaatcccattgtggaaaatggacagactcatccgtgtcagaaagtcatacaggaaatatggncagtttatccgagactctaaataagcaccgagctgataatcggattgtagagcgtgttcaaggtgcctgcgctttgtggtcctgngaagcnaangactgaacactgtgcagcnctagtccacaatgngaat

SEQ ID NO: 181 - DNA, 644 bp, Homo sapiens
  misc_feature (1)...(644): n = A,T,C or G
acaagagaggttccaggagggggtgataggcagaattttggtccccatcaccttccctgcccagtgttatgcctatgaatgtgttacattatgtggtaaaagggactttgcagatgtaactaaaatttctaaaatagagatattatcctggattacctgggggaacccagtgtaattacatgaacccttaaaaatggaagaggatgcaggagtcagattcaaaggaaggcccaaggtgctattgctgacttgaagatagaggggccatgtggaaatcaagagaaggaagtgaatccttccagtgagcttggaagagagcaccttgaggcacagatgagaagcttggccttacctgatgccttgattttagcctggtgagaccccgagcatataaatttgctgtgctatgccacacttctcacctacagaaacttagtttaaagccactaagtttgtggtaatttggtggctttaggccccttgagggtagagatttatggcttgtgttacaagtagaagagcagtggaaaagttgggctttggtaattctttcaagggtgaattgtagttctgggagtcctatctancttgggntcagaacnttgttgggcangncctgctggggacttcctggtttaaccttg

SEQ ID NO: 182 - DNA, 609 bp, Homo sapiens
  misc_feature (1)...(609): n = A,T,C or G
ggtacagaaaagtcagatcaaattggatatgtagacattgctaaggattttgaactctaagggcattgataagctactcaagggtttttagtaggggagtgacttgattagacttatttatttgttgaaaagtctgtgtggctggtgtgtggaaaatagaatggattgaaaaggaactcaagtggagcatcaagactcagttaaggagttaatctaggttggaaataattgtagcttaggcctggatgctggcaatagggaaggggatggattcatgaaagaatgggatacttgagaagaaatatttctgtgctggagaagtagattggggaagttcatggcataaacattataatggatgctatgggcatagataacataaacatgtagagaaagtaaaggtgacctagggcagaagccttaggaacccaaaatttaagagtagactgaagagaaccgctgtagaagtgggaggaaanctgctcgtgtgggtagacaaggagaccnttcaaaaggatcatcattacagtnaaaagctggcaactcggcgtcttggtgaaagtncctgcccgcggccgtcnaggcnatcagccatgcgccgtcttaggn

SEQ ID NO: 183 - DNA, 401 bp, Homo sapiens
ggtactcatcctttgccagcaaagatgcacaactataactatggtggtaacttacaggaaaatccgagtggccccagcctcatgcatggacagacctggacttctcctgcccaaggacctggatattcacaaggatacaggggacatattagcacatcaactggcagaggcagaggcagagggttaccatactgagtatctgtttttcctcaggcacatcatttttatctggaaagacttttctagctgcaatttaaggcagcaatccaagagacttgaataataataattcaacaacagctttatttttatgtggagaagggtcttgcatacaatagtttaaaaaagacaaaaaaaacctttgcttaaattcatgctgttctaaaaactagatcgattgt

SEQ ID NO: 184 - DNA, 423 bp, Homo sapiens
ggcggcggatggaggtcagcggtggtgctcgctgcggtttggaatcacttgctaggagtcttgtctctctgccacccaggacatcatggcagctcacctggtaaagcgatgcacgtgcctcctgagagaagctgctcgtcaggcccctgccatggctccagttggccgactgagacttgcctgggtagcccataagactctgacttcctcagccacctcacccatttcccacctcccaggttccttgatggagccggtggagaaggaacgagcatctactccctacatagagaagcaggtggaccacctcatcaagaaggccacaaggccagaggagctcctggagctacttggtggcagtcacgacttggacagcaatcaagcagcaatggtactaccggcgctacaaagtgaagtcgtacc

SEQ ID NO: 185 - DNA, 669 bp, Homo sapiens
  misc_feature (1)...(669): n = A,T,C or G
acccgcagcttgtccccatcctcatattcatccaggcaaatggcacagacatcatactggtctcccttctgatagtcatgtgtaggaatctgtttcagttgctctttggtaagtcgattccgctggagccgtttccggtgctggatacaacgagctatcattactgctcccatggccaaaaccagcagtcccacaatccctgtgaaagggatgaggtaatagcccaaggggaaggtattgtctggaaccagaagcacccgagcccccttctcgtagacaaagagggcacgcaggtacaaagagagaaattttaaagctgggtgtcaggggagacatcatatgtcggcaggttctgtgatgccccctaagcccgtaaaaccagcaagtttttattagtgatttccaaaagggggaagggagtgtatgaaatagggtggtgggtcacaagagatcacatgcttnacaaggtaataaaaatatcacaaggcaaaatggaggcagggttgagaacacnggaccacattgaccaagggcgaaattaaaaattgtgaagtgaagttcnggccacgcantgncantgatacatcttatcaggagacaggntttgagagcngaccancagtctggnccaaaattaataagtgggaaatttcttggcctaataagccg

SEQ ID NO: 186 - DNA, 638 bp, Homo sapiens
  misc_feature (1)...(638): n = A,T,C or G
ggtacatgtgcgttggcattatggatcgatttttacaggttcagccagtttcccggaagaagcttcaattagttgggattactgctctgctcttggcttccaagtatgaggagatgttttctccaaatattgaagactttgtttacatcacagacaatgcttataccagttcccaaatccgagaaatggaaactctaattttgaaagaattgaaatttgagttgggtcgacccttgccactacacttcttaaggcgagcatcaaaagcccggggaggttgatgttgaacagcacgctttagccaagtatttgatggagctgactctcatcgactatgatatgggtgcattatcatccttctaaggtagcagcagctgcttcctgctgnctcanaaggtctaggacaaggaaaatggaacttaaagcagcagtattacacaggatncncagagaatgaagtattggaagcatgcagcacatggccaaaaatgtggtgaaagaaatgaaaacttacctaaatcatcgccntcaagaataagtntgcagcngcaactcctgaanatcacttgacccttagntgaccttaaagcccgnaaanaccttgcctcccccggaaggaaggcctaggttcccgggcc

SEQ ID NO: 187 - DNA, 628 bp, Homo sapiens
  misc_feature (1)...(628): n = A,T,C or G
ggtacatagaaattcattgaggtatatagatactcatctgtctaggcagttcccaattttctgaagaatgttttacagcaaaattttctattttcttttattaaatagtgacacgtcaaacaatgtcacatccaaaacactagtttcatcaatttctagcagtaataatagacttgctgtaagtattgttttctgatgccatacccttgtcatacatattattaaatgaccaatattatgtatgaagtagacaaaaaaatttactcaaacttcattcaaatcctaattgtgataatttttgttttatatttaattataaaccaaaatacatttgcatttttaagctaatttgtctcaaaattttgctttatatttttggatcaggttaaagtcctggggatcccctgaatgttattgccctcttggattggtttttacttctgagctataccgtcaaaagacacataagcttcaaaagtcaagacaaacctcatttgccataaaaatcaagatatagatgtctggtccgaaactncttgaaaaacattttaagcatcaatatgactggttccatgaacttaagtacttcttaatgagtattctttctgaagctgaaagaagattgttt

SEQ ID NO: 188 - DNA, 654 bp, Homo sapiens
  misc_feature (1)...(654): n = A,T,C or G
cgaggtacaaggtggactgtgcatgcctcaaagaaaacccagagtgccctgttctaaaacgtagttctgaatccatggaaaatatcaatagtggttatgagaccagacggaaaaaagaataaaaagacaaagatatttcaaaagaaaaagatacacaaaatcagaatattactttggattgtgaaggaacgaccaacaaaatgaagagcccagaaactaaacaaagaaagctttctccactgagactatcagtatcaaataatcaggaaccagattttattgatgatatagaagaaaaaactcctattagtaatgaagtagaaatggaatcagaggagcagattgcagaaaggaaaaggaagatgacaagagaagaaagaaaaatggaagcaattttgcaaggcttttgccagacttgaaaagagagagaanagaagagaacaagctttggaaaggatcagcacagccnaaactgaagttaaaactgaatgtaaagatcccagattgcagtgatgctgagttatttangaacnagccatagaagaaaatgctagcagccaacccctgccaagtaatagactaancggggaaaagttttctcgagtaggactacttggcagcaccgtcggagaccngactgtcacatggttanan

SEQ ID NO: 189 - DNA, 650 bp, Homo sapiens
  misc_feature (1)...(650): n = A,T,C or G
ggtactttaagataattgtattgatcttttttcagattccttgtatttttaataaagtaatcttaaataaaactcagataggttaagtgttagaaattttaaacagcttacattgttagcgtaaagttatcttttcttttttcctaatcagagttcttgaccctttggttattgagtttaaaacttcaattgaaattcaatagtatttattttttaaaaaaatcactaaactgtgcctaaagaacataactgccatattaatgttttggtttatatcctctatagtaatagaaaaacatttaatacttgtaatgctgatgtgttaatttgataccagttgagtagaatgtgatcaatccagtttacaatctatcatgagtattattaactaaaatctatgtgcttttcaataggaatcattcttctcttgctgnaacacttgccttaacttttangaaagnggtcatttttaaactgcactggnaagggtgaaagttangactcttggatttggngaccgnaatctgaagccgaatanttaaagggagaaaaagaaaccaggtctttttgccaaaggctgggaaccntattcanctttgggnaagtaattggatatnccaagggtgggangacaagtctgaaaatcacng

SEQ ID NO: 190 - DNA, 699 bp, Homo sapiens
  misc_feature (1)...(699): n = A,T,C or G
accagctctaatctgtggcgtccagttttctttctttttttttttttcttttttaatgtcaaagtgaatgtctgaagttttgtctttttttctttgtccttttccatctgcttcattctgtggggataaaatacttgtgtttaatcagaacaactggaacgcattgaggaagggatggaccaaatcaataaggacatgaaagaagcagaaaagaatttgacggacctaggaaaattctgtgggctttgtgtgtgtccctgtaacaagtaggtgctgcctgcctgcctgaagctttgatttcccaaggcccatctccaagccttgacaaagctcattcctgccaagctcataggcaggatgaagcatgtggcatgcagaaacagatcaatacccgcttcaatgcattcatctcatagcatagaagatattaaccaggaagttactgggtgatgcanttaaaaaatcaaggccatacctacaggtggaaagcnttcacntgtcagcnaacntttaattggatgaaccggtttcaaccattttnccaaaaaaggtgtacctggggnnaagggggtgggcccagtggcccccaagtgggacctnttgaaaatgaaaagggtggttcntttccactgggccctttgggccttggtaaccaagncctcttccgcgggggcaaggcaantanccttggcccggnan

SEQ ID NO: 191 - DNA, 378 bp, Homo sapiens
  misc_feature (1)...(378): n = A,T,C or G
acaaagattccagacagactttgttttttggcttataacaatgtgtagatactacacaaagaatgaggatgtaattttcatttacaagcaaaatgtgaccaaaatcccttttcttcttaaaattgaaaaatgaaattcttgagaatactaattagtgacggccaaatcttagactattttaaattagccatggttaaacataggtgagttaaacattgtgcctttccaaaattaaggtttgcagttagaaacataaacatttgataaaacttctcaaaattaattatgagtggcttattcatgtcctttggattccagacacacactanaaaaagtaaacgttaaagaggtgatattttggaaagcatccctagtacc

SEQ ID NO: 192 - DNA, 624 bp, Homo sapiens
  misc_feature (1)...(624): n = A,T,C or G
acagtaaaaagtaaacttccctccatcccaggcctgccagcatccctgatgccgactttctgggtgtggcctagggcccctcagtgtaatgtaggggttgtgagcacagactttggtgccagtttgctaggttcgaatcctgactccctctttgtagctctgtgcttcaattgaaatactgtgcctcagtttctcctttataaaggcagggatcatgagagtgcctgtcccttgtgagcactatgaaagtgttagctgttctttaccagaataaatgcatttctatatcttcccatatgcattttgttaatttttaaagtatttcaaacacaaagtttgaaacagaaaattgtgtaacattaactatgaacttaccacccagaatttacaaatgctgacattttgcaatatttatttcggatctatttttaagggggggaaccctgcagttactgcttaatcctctttccaccccaaccttttatttttacacaaggagccatagtggtcatacttaagctatttttttcagtaactnaatatattttggaaganctccctcctaggncatanaagctttgncccttttttttacagtggtaaacctttnggactaaagggcng

SEQ ID NO: 193 - DNA, 348 bp, Homo sapiens
actgctacttctataaacggacagccgtaagactaggcgatcctcacttctaccaggactctttgtggctgcgcaaggagttcatgcaagttcgaaggtgacctcttgtcacactgatggatacttttccttcctgatagaagccacatttgctgctttgcagggagagttggccctatgcatgggcaaacagctggactttccaaggaaggttcagactagctgtgttcagcattcaagaaggaagatcctccctcttgcacaattagagtgtccccatcggtctccagtgcggcatcccttccttgccttctacctctgttccaccccctttccttcctttccacc

SEQ ID NO: 194 - DNA, 627 bp, Homo sapiens
  misc_feature (1)...(627): n = A,T,C or G
ggtaccttctcagccagctgcagcaaagccaaatggcagagaagcagttagaggaatcagtcagtgaaaaggaacagcagctgctgagcacactgaagtgtcaggatgaagaacttgagaaaatgcgagaagtgtgtgagcaaaatcagcagcttctccgagagaatgaaatcatcaagcagaaactgaccctcctccaggtagccagcagacagaaacatcttcctaaggatacccttctatctccagactcttcttttgaatatgtcccacctaagccaaaaccttctcgtgttaaagaaaagttcctggagcaaagcatggacatcgaggatctaaaatattgttcagagcattctgtgaatgagcatgaggatggtgatggtgatgatgatgagggggatgacgaggaatggaagccaacaaaattagttaaggtgtccaggaagaacatccaagggtgttcctgcaagggctggtgtggaaacaagcatgtgggtgcaggaagccaaaagtcagactgtggtgttggctggtgcttgtganccccccaagtgtnggacccgccgccaaggcaaggaaaccttgggccctttttaacgggcccnggaattcccaaggttcntt

SEQ ID NO: 195 - DNA, 405 bp, Homo sapiens
ggtacaattccacttatccatactattcctttataaaaggcagatttcaggtaagcttctaaatgcatgcgtaatgtagaggctaatattttctggcagtccttggttcctgaaatttgaacttcatatgtgttttaaacttttgtcaaaatagtcatgaaagatatgttatttttgcataatgaggtaatatatcaggggcgggcactcataagacagtataaatccacttgtctaaacttgcatgaggctgtgtgcattgtaaaatgccataaagagttttgggtcagtgaatattttgctgaaggaataacacttacatttaactgagcacttttctgtaataaataccaaagtaggtttttgtagctgtaaactgtgtacctgcccgggccggccgctcga

SEQ ID NO: 196 - DNA, 658 bp, Homo sapiens
  misc_feature (1)...(658): n = A,T,C or G
ggtgaaaggagttaaaacgcccagtggtcattaagtgaaacatcttttatcaacctgcaaaagctgcagcgttctctgccaggtcaaatgggcatgtttagaaaataagagaagatggctgagtatagctaatgaataaatggttgtttctttagaaaattaaacacacacagagtgtaagaggagaggatacggccctccctgaaggataaagtccacctggacggtgccctgccctcgcttctcacattaactgcccaggaatgtcatgctgattggttcccggaagggtgtttggcaaggggcagtgtatggagctacgtgtagaaggagagaaatttgtgtgtggcttttgtaaattttgaccgattgcagcaattaaataagttgattactgngttgatttaaatacttatgaaagctttcaagacnaaaaataaacctttcacgttacccccaaannaaaanantnnnnntttanataaaaaaaacttggancggnatgnggtttcttggaaaaagtttggatgccatttgcnaaattcttcnttttnggtttnaaaattgaacncaggnattngggggganccnttttggaaaaancccataagcttggtttncttgnnnaaactttgnaanttngccccnggnttaattn

SEQ ID NO: 197 - DNA, 615 bp, Homo sapiens
  misc_feature (1)...(615): n = A,T,C or G
ggtacagagaaagaaataaaagatactgagaaagaggtggatgacctaacagcagagctgaaaagtcttgaggacaaagcagcagaggtcgtaaagaatacaaatgctgcagaggaatccttaccagagatccagaaagaacatcgcaatctgcttcaagaattaaaagttattcaagaaaatgaacatgctcttcaaaaagatgcacttagtattaagttgaaacttgaacaaatagatggtcacattgctgaacataattctaaaataaaatattggcacaaagagatttcaaaaatatcactgcatcctatagaagataatcctattgaagagatttcggttctaagcccagaggatcttgaagcgatcaagaatccagattctatacaaatcaaatgcacttttggaagccnggtgtcatgaaatgaaacccaaccttcgggccatcgcagagtntaaaaaggaaggaagaattgnatttgcaccggtagcagaattggccaaaatacttntgaagggaccggtttagaccaaaaaanaannntanaaaaaaaannnttnacttgcccggnggcccttnaanggggattcncccatgggggccttttangg

SEQ ID NO: 198 - DNA, 557 bp, Homo sapiens
  misc_feature (1)...(557): n = A,T,C or G
gggacctgcagttggtattgatcttggcaccacctactcttgtgtgggtgttttccagcacggaaaagtcgagataattgccaatgatcagggaaaccgaaccactccaagctatgtcgcctttacggacactgaacggttgatcggtgatgccgcaaagaatcaagttgcaatgaaccccaccaacacagtttttgatgccaaacgtctgattggacgcagatttgatgatgctgttgtccagtctgatatgaaacattggccctttatggtggtgaatgatgctggcaggcccaaggtccaagtagaatacaagggagagaccaaaagcttctatccagaggaggtgtcttctatggttctgacaaagatgaaggaaattgcagaagcctaccttgggaagactgttaccaatgctgtggtcacagtgccagcttactttaatgactctaacgtcaggctaccaaagatgctggaactattgctggctcaatgtacctnggccgcgaacacgctaagggcgaattncacacacttggnggncgtctantggatnc

SEQ ID NO: 199 - DNA, 498 bp, Homo sapiens
acaatgatgcttctcacagcttcaaagacatgtctgaggcatcctaactgcgaatcagcccataaaaacaaagaaggagtatttgaccgtatgaaagtggcattggataaggtcattgaaattgtgactgactgtaaaccgaatggagagactgacatttcatctatcagtatttttactggaattaaggaattcaagatgaatattgaagctcttcgggagaatccttattttcagtccaaagagaacctttctgtgacattggaagtcatcttggagcgtatggaggactttactgattctgcctacaccagccatgagcacagagaacgcatcttggaactgtcaactcaggcgagaatggaactgcagcagttaatttctgtgtggattcaagctcaaagcaagaaaacaaaaagcatcgctgaagaactggaactcagtattttgaaaatcagtcacagtcttaatgaacttaagaaagaacttcatagtacc

SEQ ID NO: 200 - DNA, 615 bp, Homo sapiens
  misc_feature (1)...(615): n = A,T,C or G
ggtaccctctcttccagcacccaggccagtattgagatcgattctctctatgaaggaatcgacttctatacctccattacccgtgcccgatttgaagaactgaatgctgacctgttccgtggcaccctggacccagtagagaaagcccttcgagatgccaaactagacaagtcacagattcatgatattgtcctggttggtggttctactcgtatccccaagattcagaagcttctccaagacttcttcaatggaaaagaactgaataagagcatcaaccctgatgaagctgttgcttatggtgcagctgtccaggcagccatcttgtctggagacaagtctgagaatgttcaagaatttgctgctctttgggatgtcactcctcttcccttggtattgaaactgctggtggagtcatgactgncctcatcaagccgtaataccaccattcctaccaagcagaccacagaccttcactacctatcttgacaaccagtctggtggncttattcanggttatgaagcgaccngccttgccaaggataccacctgnttggcaagttttaactncaggcttccttctggaccccaggngttcccaaattgaagtccttt

SEQ ID NO: 201 - DNA, 256 bp, Homo sapiens
actgcactttataaaagcatggataatattaaaggatcacaaaaggcagcattagcattctctatccaggtattattaaatctttttatcccatgcccccctcaaatataggagaattattatctgataagcctgaaacgactttttttaataccataacctaaaaagacacttcttacaggtgtatgcaactttggtcagcagaaacacaatacgagcctctggcctagctaaggcactctattctgaaagtacc

SEQ ID NO: 202 - DNA, 584 bp, Homo sapiens
  misc_feature (1)...(584): n = A,T,C or G
acttttcaatctgatccattatcttctcgactctttctggaggcactttcccacgagtttgcatcctttcggccacattgtggtagaaatcctgagcacactctgactgttcttcaatgcttagatcccttttgtaatgcattccttccaaaaacagcttggtctgtttatagatttcttggcctgtcttgtggaaggtcttgagaaattctatgaactccttagacactctatccgtttcaatgctggtttgccggtttatggaaggactgggagcttttgcttcctgaatttccttctttgatccgaccctggaagaatgcactgaagaaattcttcactgggggaaccctgccggtcttcttgntgggtttcttttcttcaaacttggaaaatgtnaaggattgggcccctgggtgggttnactggtngcaaaggctttttttcttccctgaggcnttccgcagtccannctctgaattgntttgcctggcttgnggacctggccgacacctangggaaatccaccactgggggccgtctaagganccncntgggccaacttggggnanntnggtannntt

SEQ ID NO: 203 - DNA, 608 bp, Homo sapiens
  misc_feature (1)...(608): n = A,T,C or G
ggtactcttatacacacctgttttctccaatgttctcctttagtatggctggtaattgttttggtgattgccaccccctcgagatgccttgccataagtgctctgttggcctattttgaaaacacagaattctcatttagttttctacaaaactttctttacaaacacaaactattaaatctacaaatctttgcatgctaaataaaaagtattaagatattttagcacccattagatgctactcataaatcatacatcctagttcatttataaccaccagtctatgttagtataatcatcctatgattgtaacatgcctnaaacacttaactccgaacactttaatggaaagcccatacacacaatttcagaacaggattgtatgttaacaatgaattttaataccactgctttataaaattaagttaaatattcttaccactgnaatctgcatatcctgnccatatcataggtcccataggtatacccaggataaacatattcggcatagcactatggtttgaacacctggcccggccggccggtncaaaaggcgaattcancnactggnggccggtncnatggatccancntcgnaccaactttgg

SEQ ID NO: 204 - DNA, 621 bp, Homo sapiens
  misc_feature (1)...(621): n = A,T,C or G
ggtacctgaagatcttgatttgctacacgagctttctctagggcattatagtaagaaactgcttctttctctcgctcctctttttcctctttaagccggtctacctggcgcattaggttagtaataagaagttctagctgttcttgtctgtattgtagttcattcacttcttctttgagggtggtcttcatactctccatttctgtcagctcaatttgaagagccagcatctctgaagacatgctttcctgcacacgttcagacattacgcgcagttcctctgatttacaagagaggagttccttctgatgatctacttggtgcttcagctgcttttcactaagcctggcttcatctaattccactttcagtttttctatcttaagtttttaagttcattcacttcctgccatggcttctgcttagttgtcttccnatttcttcaggtgcattttttggtggtggttaatagcttcacattcgcaagctcaaactttctaacattcgactcttgagttcaacttctcttttgaangggatattttcntggtcataactcttangcatngggcataattcttaccacattatccaatggatccggaattcantttgccctnt

SEQ ID NO: 205 - DNA, 607 bp, Homo sapiens
  misc_feature (1)...(607): n = A,T,C or G
ggtaccacctatcataggtattaccacacaatttcatgcatggtggcatattttaactggccttggttcctatcttcacatccttttcagtttgtatacaagaacactttacctgagatataggccaaaagtgaagtttctctttggaatctggccagtgatcctgtttgagcctctcaggaagcattgatgaatcattccaccaagaaaacaaacaagcacctaccatagacctggcagaataaataaggaaatccttaaagatctacaagttcaaatatgtcatgaccatcacagcagaggagtgactttctgactaatgctgccacccacacagagaataaggagtagggcctgctgggtgtttagctcatggctttatcttatttgccccctcctctttcacgctccagtttataaaagaaacagagatgatgtgtgtgtatgcctcaaaatgcagaaacaggtgggcttttcttaacanggtnacagtttgtgctgggtataagaaaataaccctctttcttttngccaagggtgcatgtgaattatcccttcttaanattggttaaataagcantnncttanagcccccaaancnctntnn

SEQ ID NO: 206 - DNA, 572 bp, Homo sapiens
  misc_feature (1)...(572): n = A,T,C or G
acgcgtgacgtcactcacatagcaggaagactcacaacctccatccagaagcaccatttccccatccttgatgagttgattatttttcacatagtgcaaagtgtttgaccgattaccaccagccaccacaggtggataggctaaaatgtctgcgccacgagcccggcattcaaattcaaacttagcataaagaaaggcttcttccacaggggctttactggtgaacatggtttctatgaaagcctgtgatgtcagcttcccagcaatctgcattcgttcaatttctgcaggagacttgatcagccggaggcgctgtatcagctgctgaacaccccgaaccttgttcttgctcttggctttggcctcagtcaggggctgcatatagtcagagtgaagctgtgcatgtgagggccttatccaggtcataccaaaccatgttcgtctcagctttcattttttggtagaagatgttgaaattcttctagcgtataggcttcgtctactccagttagagctattggttccatcagtgccagantcgnggaccattccaaaaggtttnnactngggag

SEQ ID NO: 207 - DNA, 616 bp, Homo sapiens
  misc_feature (1)...(616): n = A,T,C or G
ggtacctgtcccattcctaaaaggatttgtgggtaatgctggcacttggtggccaggagaatcttctgaccccactctccctcctcttcagtcctgaagaccccaagaacccagttaggatcccctggccagaggtctctgtgactgcctctggactcagcacgtgcagcagcttgggaggatttgagccagtctcaaaaacttttagccccagaatgagaccagtgaccccaagcaggagggctgggatctggagggaagagagggggtccaaggggaccctgtggctgaggccatggagaaccagtgccagggcccaagagacccatttttccagttatcagaggtgactgacatcttctgccactgccttgagttcagaaatttaaaaaagcttgcagcaagaaaatgccagtgtgcaactgggtgactaaagaccaaagaaaaacagttaaaagggacagcttacttgctctctgtctcangtttaacttctcacctgaaatctctnataccctaattaacacaaccaaagtctctttcatagataggctacttttaagtttnactgcttctgtggtgggctttgggggctttggaagtgggaattttttgg

SEQ ID NO: 208 - DNA, 614 bp, Homo sapiens
  misc_feature (1)...(614): n = A,T,C or G
acacaacgtcatgaggttattcgaaccacagcgtcttcagaactttcagagaaaccagctgagtctgtcacttctaaaaagacaggaccccttagtgcccagccctctgttgaaaaagagaacttggcaatagaaagtcaatcgaaaactcagaaaaaagggaagatgtctcatgacaaaaggaagaaatcaagaagtaaagccataggctcagatacttctgacattgtgcacatttggtgtccagaaggaatgaaaaccagtgacatcaaggagttgaatattgttttgcctgaatttgagaaaacccacctagagcatcaacaaagaatagaatctaaagtttgtaaggcagccatcgccacattttatgttaatgttaaagaacaattcatcaaaatgcttaaagaaagccagatgttgacaaatctgaaaaggaagaatgctaagatgatttcagatatcgaaaagaaaaggcagcgtatgattgaagtccaggatgaactgcttcggntagagccacagctgaaacaactnccaacaaaatatgatgaacttaaagagagaaagtctttcctttggaaagcacatatttcttatctaatttaaacanc

SEQ ID NO: 209 - DNA, 610 bp, Homo sapiens
  misc_feature (1)...(610): n = A,T,C or G
acactgttttgatggaagaggacattgtggacacgaagtaactggagatggccttcagaatcagctgagctgctgtctgctttggaaaaccgttcctgccgctgccgatggatggaaatgcaatggatttcagcttcttatcatcagccagggccaagcagtttttcactgtcttttccagaagttcttcacacttgtctgcaccccaaactggactattacagtggatcacaaacttggcaggcaggccatggcctgcgctgacagcagctccagctacttccaagggcccgttctttttccggagttccaggacagcttccacaaactccttgccacctttcttctccagcgtgtttcctaggtcatctttaaggtcaatgtcagcattggtaggattgattatggcctncacctcaaaagcccggctaaatactgatttcactgngaataanggtcaacttttgggccanggaaaagctctttggtggaaaaggactgtgaaaaccntnggcaagngggccctcgggtgggctttnngggcttgntggcnttaagggantnancngngttttnggaattccggnccctttttggccccnggttttta

SEQ ID NO: 210 - DNA, 589 bp, Homo sapiens
  misc_feature (1)...(589): n = A,T,C or G
ggtacccagctctaattactggccgtagcagcatattgcttaagaattttgtagaacttatttctcatcagcagctgtccaaaggactgataaatagagacagatcccagtcctggatactttctgtaaatcctaatcggagactcacttctcagcaatggaggctgaaagtcttagtgagactcagtaaattccttcaggccttggcagatggatccagtaggttgagagaaagtgaaggacttcaggaacagaaagaaaatccccatgccactagcaactccatttttatcaactggaaggaacatgccaacgaccagcaacacatccaggtttatgaaaatgggggttcacagccaaatgtcagttcacagttcaggctacggtatctggttggaggactgagtggtgtggatgaaggcctgncatctactgaaacctgaaaggattattgngataataattccttgntnaatgaatgctggttgaactgtacctggccggccggcccttaaaggncaattcngccacttgggggccgactaaggganccncttgggccancntggggnaacanggcaannttgtn

SEQ ID NO: 211 - DNA, 590 bp, Homo sapiens
  misc_feature (1)...(590): n = A,T,C or G
acgaactgtagcatcagctacaactgccattgaaattcgtaggcaatccagtagttatgatgattcctggaaaataacagatgaacaaagacagtattatgtaaatcagtttaaaaccattcagcctgatctaaacggatttattccaggatctgcagctaaagagttttttacaaaatcaaaacttcctattcttgaactttctcatatttgggaactctcagactttgataaagatggtgcattgacactggatgagttttgtgctgcttttcatctggtggttgctaggaagaatggctatgatttaccagaaaaacttcctgaaagcttaatgcccaaactgattgatttggaagattcagcagatgttggggatcagccaggtgaggtaggttattcaggctcttctgctgaactcctncaagcaagtcccatcgatgccattacttaacccgacttggnctgactgaatcaaaccntgaccatgggaaacattanngacgctttttaagctacaaantttggncccattggttttaaatttggcccnattgnaccggaaccggantgggnattccgnnccattn

SEQ ID NO: 212 - DNA, 614 bp, Homo sapiens
  misc_feature (1)...(614): n = A,T,C or G
ggtacattccattactaaatgccacataactgtttggataacataagaagagtgggtcattatatgataccaattagaagatattagggatggtggaggcagtaatttctgggataagaactataatttacagaataaccagacatcatctgatctggtgaaacctgtgcattcccacaattaggctttttcacactttctctctttaaatgtgcaacaccttccccatcccctctttacttgtagcaagttgattttgcttcttatatcccgagaaagcaactaccaccaaatctaccagtcaactcatctatatttgaacttaaagatctttatgttagaatggaatctatccatgttccagcttaggcgaagcccttctgaagatatccattccttccttcctcatcaaattttccttcttgactaggattaaaaaaattcaaccagtaggcataatccgaacctttggnctcataatgaaaaggatagttaataaggctcatcaattgggccgnaattttgntttgggtcaagngttggccaaagcnncnnaaanggccccanttttgggtaaaantttttnaggggttaaaanccanggggntncannn

SEQ ID NO: 213 - DNA, 624 bp, Homo sapiens
  misc_feature (1)...(624): n = A,T,C or G
ggtacctctcttgtcatcaaattttgcccagttatttaatgttggattcctcaaggctcagtcagcaccttttaagccactctaaactcccactaatggataagctcatttacttccaaggcttcaatggtcacaatacaacactgctggctctccaacttatttttctataaaataaaaaataataaaggaacaacgtatttttctattcaagactttttatctgagcttcagatacatatatccaattgcttacttgacatctccacttagaggccagaggcatttaaactcaatacgtcttaattcaatctcatgatcttccctctgaaatctaatctcctactcttccctatcttaatgaaagacaacaccatccgtccctttacattaagtgcttcagcttatccctacatctatctcatcactaaagaacaggtattttcacccttttgagtatcattcaaatgcnttctacttcttttccattcntactggtacccccctangggnaagntattaactttttcctacctacngncccttttgnancccttccatcaantnttccnaattgnganggtnaatttttnnaaccccaanntggncatacnnngtgggnng

SEQ ID NO: 214 - DNA, 612 bp, Homo sapiens
  misc_feature (1)...(612): n = A,T,C or G
ggtacaagtctgttaataccctatgtggtttcattaggataactttttacctatccttgaggtcatccatattcttacaggccttccagtcaataatggaagagctcactctatacaaaaccaatatgcaaggcatgtgtttgtccaagcaattggatgtgtgcagtagccaatttcatttactgcattactctttggcctgggaaccctgtggtctgcactacatgtgaatggccttccacttcagtcttaggcagatttgaccttttaggggcagcaatgctgaaggacacagcaatttaaattataatgtgtcaggctgtgttttcacttcaaacatgtatgagtagtcagctgtaattagagaaatgatgacttcctaagagttcagccacgcataattctagatttcaagagcatctaagacttgtggattacctcatggcatgagagtttcagactcagccntntgagccagtcnagggaaagtggagtctgcaacgcaaatgaaaacctggctttggggccaanggacttggctttaaatgggcccccttnggcctgggntttcctcttttggcnaaanttttngtnnccaangaaagtaatnag

SEQ ID NO: 215 - DNA, 618 bp, Homo sapiens
  misc_feature (1)...(618): n = A,T,C or G
ggtactcgggaggctgatgcagcagaattgcttgaacccaagaggcggaggttgcagtgagctgagaacgtgccattgcactccagcctgggcaagagagcgagactccatctcaaaaaaaaggtgagaaagataggtgtgaacatgaggtggcaggtgtgaagataggaaaggcaggctcacccctgatgacatgcagttagagagacgggggcttccctttcactttggagagtaaagagaaggctctgaggtatcaacagcctgggctgttgggaaaaggacaaagaatctgtgtttcctgaacgccaagaggaagtctctttggttgctgtgggctaactggtctcctccagttccaagaggtcatccacatattccacaacttctccctcatcatcatccattatattttccttanccaaagtcatacaagcttcntctggagtggtggncacatttaagaactgaactgntttaagnctgggctggaantgctcattcnanaggccccantggncctnnggganctngccngccggcccnttaaaggcgaattccancanntgggggccggttttanggganccaacttgggnccaacttggngaaatatgg

SEQ ID NO: 216 - DNA, 595 bp, Homo sapiens
  misc_feature (1)...(595): n = A,T,C or G
ggtactcccattcagggtgacgaagtgggcagaactgggagccatcttgcccagccccttggtgctatgtttaccttgaagcaatccttcggccttaggattggcctctagtagttcattacactgacctagagctacctctgataagagcagcagtcctgtattctttaggcgagaggcaaagcagtaattggcactcttggaagacatgtcagcaaagtagattcctttcccaaacatgtaacctgtgatgggagcttcaggtggggcaattcgaagcccatggctcaagattcccacccagttactcatcctggaaccatgccatagaagcatcctgttatgaaggtcctctctgaaggcttctttctcaccatccttctcacttcaaacaaatccagcaaggtcatggtataagtcgctgtgtgtgggaancatgggtagaatggaaggtacctggcccggccggccnttcaaaagggccaaattccagcacaattggnnggccgttactaagggatnccaaccttgggncccaaacnttggnggaatcatgggccnaaactngttccctggnggnaaattgnaancccnn

SEQ ID NO: 217 - DNA, 610 bp, Homo sapiens
  misc_feature (1)...(610): n = A,T,C or G
actgaaaactttttttaaaaaaggtgatgatgaagtgcattctgtagcagcagcgcagctatgctttaaaccacacaaaaggctgtgtccaggtgcagcctccttcacccttcctgcccacggtgaggattgaataaccaggacttggggatattgtttgttgtcagggttattctgtgtggtaaggaatatttgtttcacatttatacattttctttttccactcacgtaagtttctatcttgagagcatagtccaaagtgcaaaacttggtgtttacaaggaaaattgtcttccagaactccactgtcatcactttcaccaaagtggaagtttgcatgaatatgctcagaatctaatattcaatgttctgttacattgtaagtgaagtccagctcaaaatagatttaatatattgaatttatttgnaccntnggccgggaacacgcctaagggcgaaattncagcaccactggccgggcggttcctaangggattcccaaactntgggnnccanacttnggcgnnaancnatngggcctaaaacttggtttcccctngnngaaaattgggttatnccggttacaaatttcccncncaaatttccgggg

SEQ ID NO: 218 - DNA, 585 bp, Homo sapiens
  misc_feature (1)...(585): n = A,T,C or G
ggtacaatttgtaaatatttcaaaggtctaggagtcataactttttgttttcatactgaaaatgatgttgatcagagaaaccaactgttttgcttttcattgctctgtgagaaatttgaggattctgttttgctgttaggtaagctaaactcagaaattgaaaaggaaaagactggataaacacaggattttcagtaagaaaacaaccccagtcttgtcttagaagccacttgttgaggagtctgttgggggaaaaaagaggatatgcttttaaaggtagaacaaaccttcttctgtgttaaatcaaaaggatgttcaaaatccaccaggacagatgctacttgggtttaaatggagccatagatgatacaaagtcctcttggggctgaaaatcacttcctatttgcatggctttactaactggtttctgttttccattatctttttcacagaaagtntttggtcaagattttttccagcctttnaaattgaaaccggtcagtantttgacccctgnttggntatttnntccagnaattnaaattgnattcnctggntccaaaggcnttaattccccttccttng

SEQ ID NO: 219 - DNA, 599 bp, Homo sapiens
  misc_feature (1)...(599): n = A,T,C or G
acaggtcacagatcctacaatcctactgtggcttgtgtctctttttccgaggcacatcctcaaccttggaaaaataaacttttaaattgattgagacttgcctcagtgattttctttggtgtatactctgtatcacttgaatactttccaagtgaagacatgctttataatccagagtatggactgttttggccagatgttttctatatactggaaagaaatgtgtattctgctgttgttgaatggcatgttctataaatctcaattacatcaagttggttgatagtcttgatgtcttctatatctctgtggattttccatttgttctagtgattattgagagaaaggtattgatatatctgcctataattctggatttatctacttctctttggagatttctccatttttgcttcatgtattttggaagcccctacttcacccagcatnggnctttcttgagccccttccaagaagtaattttaaccacccangncccatccaacccctaaccccaanggnnaaccaaccgnnggcangtnanttgggcctaaccnggggaacccattgggggnccttnggnattagggganaccnng

SEQ ID NO: 220 - DNA, 602 bp, Homo sapiens
  misc_feature (1)...(602): n = A,T,C or G
ggtacccatttaatataactatgatgcacttaaattgaagctatgccacaggatagaaaatgaattacaacttaaatacatgttggaagtgtaacactgtttttcaaggtttaaaaaaattcctaatgtcttttagccttctttaatatttttaggtaaggaaagtatgtttggattttttcctctttgtaggtatatgagattgaaatgtgaagtatttggacaacaaacgtcaagcaatgggaagccattttgatttcttgagtaatcttgtaagcattaagtgaatgacaaagtagtagtgtaacttatttcttatggtataacttcagtcaattaatataaggatagtttttgttgtatgtacactaagtggtaatataatngccattgaantatactaatctttctcttaanagactattcnnctnttaattgnttcctaatgggaacanttntggcctaacccngaaaaaggggganaaaggattnccctgcccnggccgggcntttccaaaggggcanatttncgnncaccttggnngcccgttntctannggaatccnannntggtcccaananttggggggaatcttnggcnn

SEQ ID NO: 221 - DNA, 573 bp, Homo sapiens
  misc_feature (1)...(573): n = A,T,C or G
acctaatgaaaagatctccaagaggtttgtctcattctccttgggctgtaaaaaagattaatcctatatgtaatgatcattatcgaagtgtgtatcaaaagagactaatggatgaagctaagattttgaaaagccttcatcatccaaacattgttggttatcgtacttttactgaagccaatgatggcagtctgtgtcttgctatggaatatggaggtgaaaagtctctaaatgacttaatagaagaacgatataaagccagccaagatccttttccagcagccataattttaaaagttgctttgaatatggcaagagggttaaagtatctgcaccaagaaaagaaactgcttcatggagacataaagtcttcaaatgttgtaattaaaggcgattttgaaacaattaaaatctgtgatgtanggagtctctctaccactggatgaaaatatgactgggactgcccttgaggcttggtaccnttggcnccaancccttgggaaccccaaaaactntggaagagaannggggttttcctgncaggcaacatattgcctttggcctnctttgggg

SEQ ID NO: 222 - DNA, 168 bp, Homo sapiens
ccaccatcttggaacgggaggcggagcagagtcgactgggagcgaccgagcgggccgccgccgccgccatgaaccccgaatatgactacctgtttaagctgcttttgattggcgactcaggcgtgggcaagtcatgcctgctcctgcggtttgctgatgacacgtacc

SEQ ID NO: 223 - DNA, 564 bp, Homo sapiens
  misc_feature (1)...(564): n = A,T,C or G
actgcagacaaaatctgcttttagaggcaagcggatttctgacaaagtaactgatcctttggatggcataaattcactttggggactagccttattcttcctctgaggtccttcgttcttcaatttattcaattcatcaatcaaaagtgttctcttcccagttgcaattagaagaagtctttctgcttcagcttcttctaggggcccttttccatgttcttcatcaacacagcagttaagagcctggctagcttgatagatcactgtctgttgcatatttatttcgttattgagttcctgcattttctgtttgatattaacttgacaaggaaaggcattatttttttcatccagttttgaagtaacatcttccttccgaacaatcacctgctttattgatggacgttctgtttctttgaatctttgagatctatatgcatcaatgctgtaaagaagatcacgatcttcagaaccaaggctatcacnagattcaggtcgagggacacgaagttctttngaatttcctgggtttggactttcatcacttctgctggngctttcaan

SEQ ID NO: 224 - DNA, 277 bp, Homo sapiens
acaaggctggcggttgttgggggacggttgagccttgggagggagggtcagggtctggacaggagccgcggccgccagatgggaaagaacacgtgggagcagtaatgtcaagtgacacttaaacccttagacgccgattcgttataacgcgaggaaatctaatcccacgtccctaacggtcttcggaagcgaagcagtgtcaacagtccctggtaaacacaagtagtattacaagtcgggagctcttcaagtcttggatgagactgtagagcggacc

SEQ ID NO: 225 - DNA, 589 bp, Homo sapiens
  misc_feature (1)...(589): n = A,T,C or G
ggtacctggaggctcaacggcagaagcttcaccacaaaagcgaaatgggcacaccacagggagaaaactggttgtcctggatgtttgaaaagttggtcgttgtcatggtgtgttacttcatcctatctatcattaactccatggcacaaagttatgccaaacgaatccagcagcggttgaactcagaggagaaaactaaataagtagagaaagttttaaactgcagaaattggagtggatgggttctgccttaaattgggaggactccaagccgggaaggaaaattcccttttccaacctgtatcaatttttacaacttttttcctgaaagcagtttagtccatactttgcactgacatactttttccttctgtgctaaggtaaggtatccaccctcgatgcaatccaccttgggttttcttanggtggaatgtgatggtcagcaacaaacttgcaacaagactgggcctttggttggtactttnnaaaaggccncnttgatcccatttgagnaattncncccggcccaaaaaaaggtcctaangttggtaaaatttgcaagctttttaaggtttgcccaaagnatgnt

SEQ ID NO: 226 - DNA, 636 bp, Homo sapiens
  misc_feature (1)...(636): n = A,T,C or G
ggtcaagaagcatgccacctccacaactcctacctggacctccagcgcaggtatgggagaccctcgatgtgcagagccttcccctgggagaaggagctgaaagacaaacaccccagcttgttccaggcattgctggagatggatctgctgaccgtgccaaggaaccaaaatgaatctgtatcagaaatcggtgggaagatatttgagaaggctgtaaagagactctctagcattgatggtcttcaccaaattagctctatcgtcccctttctgacggattccagctgctgtggataccataaagcatcctactaccttgcagtcttttatgagactggattaaatgttcctcgggatcagctgcaggggcatgttgnataagtttggttggaggccnnggggagtgagaagctgcttcaatgaatcttgggtataaacactaccaaggtattgacaactaccccctggacttgggaactgncgtatgcctactacagcaaccntggccnccaagaaaccccttggaccagcacacacttggaaggngaatcaggccttttgttgaaaccatttgacttaaaggattgttggaaatcttcanggnaccttgcccggcgggccctttnaaaaggggna

SEQ ID NO: 227 - DNA, 451 bp, Homo sapiens
  misc_feature (1)...(451): n = A,T,C or G
acccaaaaaccacccccaacgccccccaaccctcaggcgtgcctgtgagtgtgtctgtgtgtctcactctgactcacccagacaactgacttcagcagccaaccttggtcattcccagaaccaccactggggggcatacgtgtggctagactgggggcgcccgaatatctgtctctacaaaaagtaaaaaaaaaattaatggggtgtggtggtggtgcgtgcctgtggtatcagctgcttgggacgctggggcangaggatcacttgagcccgagaattcaaggctacagtgagttaagattacgccactgcactccatcctgggtgacagagcaagaccttgtctcaagaaaaaatttttaaatgagtaaaattcaaaaaaaanaanaaaaanaaaagcttgacacctgaaacatgggttactgcatatggnacctnggcngagacacgc

SEQ ID NO: 228 - DNA, 408 bp, Homo sapiens
ggtcccttatatggcagaatcttgcaggcagcatgtcgagtttgatatgctggtgaagaatagaacccaaggaatcattcctttggcccccatatctaaatcattgtggacttgctcagtagaatcttccatggaatattgtagaataatgtatgatatatttcctttcaaaaagctggtgaattttattgtgagtgactctggagcacatgttttaaattcttggactcaagaagaccaaaatttacaggggctaatggcagcattagccgctgttgggcctcctaatcctcgggcagatccagagtgctgcagtattctgcatggccttgttgcacagtggaaactctctgcaaaattactgaataccaacatgaggctcgtacctgccccgggccggccgctcga

SEQ ID NO: 229 - DNA, 270 bp, Homo sapiens
  misc_feature (1)...(270): n = A,T,C or G
ggtacacagcagcatcaaaaaggctatttacaagagattttcttcaacagaatccacttgaaagcactgagaatttgcatcttagctaagagcagtttaccaaggaacagggccatctaagtgcctaactagcatttaaagttgtcaaggggtggggatgtgcaaattaagcagcaaaagattattatcttgttntgctttaagggaaagtaatantggtcagaggggccagttccaagggctggtccaaggggggccgctggtcttggt

SEQ ID NO: 230 - DNA, 425 bp, Homo sapiens
  misc_feature (1)...(425): n = A,T,C or G
ggtacattatccaatttcagggaaaaaaaatacagttttcttaccaaattatccagtgtatatgactggttagaattttaagttttgatttttactgaaattcagagtatgaaatgcaaacattcaggataaaatgaattcataattacacacagttatatcaacttgcaacaaagcagcaaatatgagggcctaacacacatctcgactctccccttcccttctgatccctcaaaaaaaagtgcaaaatcaaagagtcactgcttggtccaaaaaataaaatacattgtgtataaacatttgaaatctgatggaatccagcttctattccacaggttgtcttcagtaagaatcaacgtccgaagatggaactcagttccagaagaattaattctacaatctgattctggtcctgccgggcggnc

SEQ ID NO: 231 - DNA, 639 bp, Homo sapiens
  misc_feature (1)...(639): n = A,T,C or G
gcgtggttcgcggccgaggtactccaagaagtctgtctgccattgatagggctggagcagaggtgaagagtagaacaacgcttttcagaaagattggagactttagaagcttggagaagatttcacgggaagtcaaatcaattacgattatcggtgggggcttccttggtagcgaactggcctgtgctcttggcagaaaggctcgagccttgggcacagaagtgattcaactcttccccgagaaaggaaatatgggaaagatcctccccgaatacctcagcaactggaccatggaaaaagtcagacgagagggggttaaggtgatgcccaatgctattgtgcaatccgttggagtcagcagtggcaagttacttatcaagctgaaagacggcaggaaggtngaaactgaccacatagtggcagctgtgggcctggaacccaatgttgagttggccaagactggtggcctggaaatagactcagattttngtggctttccgggtaaatgcatnacttccagcacgcttttaccatcttgggtggcangaaaatgctgcattgcnttctacgatntaaaagttgggnaaggaggccggttanaacncccntgaacncccttttgtgantgggaaaattgcn

SEQ ID NO: 232 - DNA, 369 bp, Homo sapiens
ggtactaaaaggcctcaaaataattagtgacagaaatagtgttattaatttgctaagctcaacaataagcaattccttaattaaaatcttcgagatataaatttgatgactattctcttcagaaatgacatacctggattatgttaatcatcacaagccttattagtcacacatataaacatggcctcatgcaatcatttgtctgtatatgttactctaagttgcatgagcacaaggtttaatatctatatctttaagaaaatacttgatattataaacagagtaaaagacatgatatagtagtgattactaaaaaaaaaaaattagcagcttaaatctatctatatttgaaaaaacgtagtcacaagt

SEQ ID NO: 233 - DNA, 618 bp, Homo sapiens
  misc_feature (1)...(618): n = A,T,C or G
accctctcttccagcacccaggccagtattgagatcgattctctctatgaaggaatcgacttctatacctccattacccgtgcccgatttgaagaactgaatgctgacctgttccgtggcaccctggacccagtagagaaagcccttcgagatgccaaactagacaagtcacagattcatgatattgtcctggttggtggttctactcgtatccccaagattcagaagcttctccaagacttcttcaatggaaaagaactgaataagagcatcaaccctgatgaagctgttgcttatggtgcagctgtccaggcagccatcttgtctggagacaagtctgagaatgttcaagatttgctgctcttggatgtcactcctctttcccttggtattgaaactgctggtggagtcatgactggcctcatcaagcgtaataccccattcctaccaagcagacacagaccttactacctattctgacaaccagnctggtgngcttattcanggtttattaaaggcaaccttccctgacaaaggataccacctgcttggcaaggtttgaactcccaggcctgccnggaaggaatgcncggggggattnctgggggggggnccncn

SEQ ID NO: 234 - DNA, 603 bp, Homo sapiens
  misc_feature (1)...(603): n = A,T,C or G
accagatggaaaatgtttttggtgatctggctgctgcttaaagccagttttccctaagaactccaaaggctaaactctactaggggcagagtgtgaggatagatttctaatcagagaaaagtggcctccaggagctttcatttatgtcttctccagaccaggttttcctgttatcttcctttaatcccctttcaaccaacaggtgaagttcttccagcccacagaggtagtaatatcatcttttctatctcctcctctcctttggccatgtaatgaagcaaaatattatttatttagcccaggcttgagagccactgtttgtggacagtcttcatctagattccataccctggcctaggcgaggtaaggctctctggttattgccaggatggagcccctctaccccangtctgctgtanggaataccctaattagttgangcatgcttttggaatcctgcatgttggcatatggctggnctatcctttttaaaanctctgggtgggggnatctggatatngattaagangggacaaggagccttttcttggctaanggttncaatacctttttgaatggggccagccctcaggcttcccaccc

SEQ ID NO: 235 - DNA, 328 bp, Homo sapiens
  misc_feature (1)...(328): n = A,T,C or G
gcgtgtcgcggccgangnacatggacnacaggtgangaacaggtgaacatggaggttgtagancccangggagggggagtcacttggtttggggcaaacttgctaaatgcaggaccacaggaaccanctnttcanctnccgtgagantttggctgcccangccanttaggggtgtgggcctgcacggnagacagttatccctttctantctggctcgtgggactntnnanggantcantctgcaacagtaagtggtganttcttctgnccancgtcagtattttgatggtggctttagacttgccagatnacactacntnacatcagt

SEQ ID NO: 236 - DNA, 352 bp, Homo sapiens
ggtacacctgttaggagctctatcactctgaaagccaaaagatagaatgctcatttgagcatttgcaaaatgttctctatttatatttttaaaaatctgatacatgtaagtttttctggcagattctttttgtatgttacaaaacaaaacatcaaaagctcagagtaagataagaatccctttttcttagaaaggtcaagcagatacttcttgacatcatgtcctttatacaatggcatattgttcatataaaaggtctcttatcctataaaaatcttgacaaaggcagccttctaatccaatgcgtccagtttccgttctgcggactgctacttgattgttgcaaacaagt

SEQ ID NO: 237 - DNA, 607 bp, Homo sapiens
  misc_feature (1)...(607): n = A,T,C or G
ggtacaaatgcgcttccagcaggaggtcatggacagccctatggaagaggtcctgctggtcaatctttgtgaaggaaccttcttaatgtcggttggtgatgaaaaagacatcctgccaccgaagcttcaggatgacatcttagactctcttggtcaggggatcaatgagttaaagactgcagaacaaatcaacgagcatgtttcaggcccctttgtgcagttctttgtcaagattgtgggccattatgcttcctatatcaagcgggaggcaaatgggcaaggccacttccaagaaagatccttctgtaaggctctgacctccaagaccaaccgccgatttgtgaagaagtttgtgaagacacagctcttctcacttttcatccaggaagcccgagaagagcaagaatcctcctgcaggctatttccaacagaaaatcttgaatatgaggaacagaagaaaccngaagaaaccaagggaaaaaactgtgaaataagactgtggtgaattagaatggctagagctacccccattntnggctttagccctgccaagtggcaggntcancaactgtcagnttccnaatcctaatcntactttgggnnntgg

SEQ ID NO: 238 - DNA, 391 bp, Homo sapiens
  misc_feature (1)...(391): n = A,T,C or G
acaaacttagaagaaaattggaagatagaaacaagatagaaaatgaaaatattgtcaagagtttcagatagaaaatgaaaaacaagctaagacaagtattggagaagtatagaagatagaaaaatataaagccaaaaattggataaaatagcactgaaaaaatgaggaaattattggtaaccaatttattttaaaagcccatcaatttaatttctggtggtgcagaagttagaaggtaaagcttgagaagatgagggtgtttacgtagaccagaaccaatttagaagaatacttgaagctagaaggggaagttggttaaaaatcacatcaaaaagctactaaaaggactggtgtaaaanaaaaantgtnannaaaaaaaaagcttgtcctn

SEQ ID NO: 239 - DNA, 466 bp, Homo sapiens
  misc_feature (1)...(466): n = A,T,C or G
gggagggagacgggggagagagagaaaaaaaaaaaaaaaaaaaaaaaaagcttgtgttggtcccagcggttcagctgaggtagggacgtgccgtaggccggaatgttaccggctgttggatctgtggatgaggaagaggatcctgcggaggaggattgtcctgaattggttcccattgagacgacgcaaagcgaggaggaggaaaagtctggcctcggcgccaagatcccagtcacaattatcaccgggtatttaggtgctgggaagacaacacttctgaactatattttgacagagcaacatagtaaaagagtagcggtcattttaaatgaatctggggaaggaagtgcgctggagaaatccttagctgtcagccaaggcggagagctctatgaaagagtggctggaacttagaaacggtttgcctcttgcttgttcantgaagtgaggaatgtgtttactgggt

SEQ ID NO: 240 - DNA, 616 bp, Homo sapiens
  misc_feature (1)...(616): n = A,T,C or G
ggtacaactcttgctaatggaatgctataatgcacaaggtcaaggatttaataaattctaaaagtgtctacatatatcagtgataactgtattattagaaatataaatgtatagaaatataaagtatatggtattaaaaacagaccttgctaatataaacatatataaagtatgtcacttctcctgtaataacagcataaagatcgatctacagtttgcccttcgcctggcactcttaaaccactcctccaatggtcaatgttgaccttgaatcaacagccgctgaacccaggagaccccacagatgtgtagattcagcacctanagggcccccctaccctctgtgctgtgtgttcccatgactccagaaataattaatcgcaacttgcattattaagtccacaggcaagttttgaaatctaactagaaaaagtagcagcaaaggccaaaataccgcgggaatttgttaagaaaagcaaccagaatttcttaaaatgctttcanttcaaggtctgaattaaggtgacnttaggtcccaccagcnttaacgnagttggggnatgttttgctgntggtttttnaaaaaagaagaatctgcnataaacatgtcctttgg

SEQ ID NO: 241 - DNA, 598 bp, Homo sapiens
  misc_feature (1)...(598): n = A,T,C or G
ggtactctatgaatgtgttacccaggagaccccagagatgttgcctgcatacatagcaatggatcaggctataagaagacttgggagaagagaaatgtctgagacttctgaactttggcagataaagttggtgttagagtttttcagctcccgaagccatcaggagcggctgcagaaccaccctaagcgggggctctttatgaactcggaattcctccctgttgtgaagtgcaccattgataataccctggaccagtggttacaagtcgggggtgatatgtgtgtgcacgcctacctcagcgggcagcccttggaggaatcacagctgagcatgctggcctgcttcctcgtctaccactctgtgccagctccacaagcacctgccacctataggactagaagggagcacaagctttgctgaactgntcttcaaatttaacagcttaaaatgccagtgcgagctttgttganatggctcctttgcttcttggaaatccacagccatggtgatgtgaccgtgttggccgggaacctacctgaacgtgacttntggcacaacgtgaccaacctnaaacttaagcatgttttaagtttangg

SEQ ID NO: 242 - DNA, 565 bp, Homo sapiens
  misc_feature (1)...(565): n = A,T,C or G
acagagcttcgggtagcagaagaggaatggcctatggacatattgactcttatggggcagatgatagtgaggaggagggggctgggcctgttgagcgaccgccagtgagagggaaaactggcaagtttaaagatgataagctgtatgacccagagaaaggggcaaggtctttggctgggccacctccacatttctctagttttagccgtgatgtgagagaggagcgagacaagttagacccagtccctgcagcaagatgctcagctagcagagctgacttcctgccacaaagtagtgtggccacacagtcgtcttctgaaggcaagctggctacaaaaggtgacagctcggagagggagagaagggagcaaaatttacctgcacgttccancagggctcctgtgagtatttgtggtggtggggaaaacacctnaaagaagtgcagaggaacctgtggtcaggccccaaatcagaaacctggcaggtccaactgcgtgaaacccaaaatttttttttgatcctgatgatgantgaccatntccncaccgtacctttggcgngaaca

SEQ ID NO: 243 - DNA, 647 bp, Homo sapiens
  misc_feature (1)...(647): n = A,T,C or G
ggtacttggaatgggggctgttttttggctggtctgagtgcaggactttgctgctaggatgcttaccaaatagaaatttgactcagagcctgtggctggggaattgtcctcaggaagtaaaatggctcgccagctttcctacctgcttgtggatgcctcagatagcaatggtcggacaggacacttcagtgtgggaagcagcatccggtgaggctgtgctctggcacagggggatcctgaatctccccatctcttctaagctgacctgtccacacattctgagggattaagcttagagcacctaagaacagcagcctccccaggagaggccagggaccaaagtggcaggaatcctagacaactctacgctttttctgcactaaccagctgggtgactctaaacatgtcacctccctntggcctnaactttctcatcgaccaaacgaangagagtagactgngctttcagcttaagaccgaaaaccgtatcttaacccttttctggnaccttgcccggccggccgttcnaaangggcaaattccnnacactgggcggccgtactaagggatcccacttngggcccaaacttggggtaaacatggcanaactggtncctgnggnaaatggtaanccgttccaaatcccc

SEQ ID NO: 244 - DNA, 603 bp, Homo sapiens
  misc_feature (1)...(603): n = A,T,C or G
acaacattcagggctttctttttttcttcggcaagctcttcttcctcagcagttttcttttcatttacctcttcctgttcctcttcactgtcagtttctagaaatcgagagtccatgcggaatctgtcatcggtgccaaagtgcgactgtaaatccatgagcttctgtccagctctgccctcaaactgaggtttaattttgaacctattactgtcatcttcagaatcagattcgtcatcatcactgctatcaaacagcttccctgatgttttacccatagactctttcacccattcctctcctggatggctctgctcctgagtcgatgtctcctctgtttcacattcactgtcagaaccgaagatgatgtgcgttggcttatcctctggatgaccatccaaattgccagagcattatgcaccagcttcttctgcactctttgctttttgcctcgcttccaaggctgncaaacgcttcttnattggcttcaacatgcttatctttagcactcacatttgacgaattactaatngaaaggggagaaaanagttttggattccccgagngcccttggatganacctttggggattcttganaaaag

SEQ ID NO: 245 - DNA, 640 bp, Homo sapiens
  misc_feature (1)...(640): n = A,T,C or G
actgggcaccattaatgaggatgcaggagatcaggtggcccaggccttcgaagatatactggaacttgtgctgctgaaggctggcgctcatggcctcttcaatggcgctgatatctttgttgagcttgaccaccagggggtcataatccatactttccacattagccacaatggcatagttcccctcctttgcaagagggataagatagtggaaacagtgaaccctcacttccagatgtaagacaagcaagcagcggtcagccatatcctggaacgatttggcaagttcactgagagtctgcatgatctgctctgacactggggggagatccgtgttcgtgtggctgcttgagcaggagaaagcatctgggatgtagaaagattggaagaaagctgacttttgttcgacttgccaaccattccaagctttcatgcntgttngccaaggctttganggcacttgaccgtcacgaaggatncttgtggaaggantaatttatcaccaaggttccaatagaactttagactccttgncaaaactggccttatgaaaacttnttcntcnctcttttggcctanctgnttngggttgngcctnttcattccanttgggnaaaaattcaaanattgctggttcttn

SEQ ID NO: 246 - DNA, 608 bp, Homo sapiens
  misc_feature (1)...(608): n = A,T,C or G
cgaggtactgtcattgaagtggaaccagcggccttcgtgagttgcgtatgctgtgtaatgtccagaaccaaccccggaaccatggtgcaccaccacagcggcgaggtcatacaggcagctctccgggccactgttctcaggctctagtaagtagcatttcatgtctaggcctctcagtggaaattctacgtatgtatcaactttatttcttaaatatgctgtccaatgaaatcttttcaaatgtaagcatagcaccttgggtagtttttgaatccaaaacttttttgtggacttttgtttctttttgcatttatggcacatatataactctgtctcatcaagttcttctaagtcggtaaaactgcgaagacaatctcgtaacgaacaaactggtccattttcttgattcttagagcgcttacttctgaactgacttggaatatctaatgaaaggtctanggaatggatcaaacttttagaatctgccccatatgaggcagttacctcattttggagaagcctccgaatatagccggacaacagtnaagctccattatgnaccttggtaccttgcagacagngtaaaatntcctgcaaaatgntgaccg

SEQ ID NO: 247 - DNA, 632 bp, Homo sapiens
  misc_feature (1)...(632): n = A,T,C or G
acagaaagtcagagaacacttacagaacttggaaaactcagctttcacagctgacaggcataagaaaagaaaacttttggaaaactcaacactaaacagcaagttattaaaagtaaatggaagcaccactgccatttgtgccacaggccttcggaatttggggaacacatgtttcatgaatgccatccttcagtcactcagtaacattgagcagttttgctgttatttcaaagaactgcccgccgtggagttaaggaatgggaaaacagcaggaaggcggacataccacaccaggagccaaggggataacaatgtgtctttggtagaagagtttagaaagacactctgtgctttatggcaaggcagccagactgnatttagcccagagtccttaatttatgttgtttggaagaatatgcccaactttaggggctatcaacagcaggacgccatgaatcatgcgctccttttggacccctaccttggaacttcaggcggntcaacggggtttccgctnaacattttgcagggaaatctactttgctgcagtaccaagtggtgctaaatggacatttntggtgcacggtnttttcgagggntntccaaatnnggttactgcntanttggggaaa

SEQ ID NO: 248 - DNA, 624 bp, Homo sapiens
  misc_feature (1)...(624): n = A,T,C or G
actccgaggggcctggcgaggacatgtagaaagactgcgttttccttttcaatcgggcccttttgttggccaacaccagactgcgccggcttgaactgatgatttccgaaatgaacttcttgcagtccacacacacctccatggtgctccagtcctccatcaactctttgggaaactggagttcttcatctgatttgtccatagacttagattttgaggagaacctggcaatgctccgaagtggccgatgatgggcagtggagggtttttctgacctcatactactttcccctctttgcagagcagaaggtcccaatgaaaagataggaagagtggagtatggtttggagggcagcccgcatctttttgcaacactgtgagcacaccggcctnttacagaactgacaggtataagaccaagtgaagaaggaaaaccttctggttcggcaaccaaagcagagctttncttttttcaagncgtgtnaagnctttatctggtgatattttccantntgcnttaccaggaccggcgaatatgntncttnttcccagtagacnagnattcnctgggaccaaattctaaanaccggacttnctgaagnggaggactgcttcgtttaggct

SEQ ID NO: 249 - DNA, 636 bp, Homo sapiens
  misc_feature (1)...(636): n = A,T,C or G
acagtaaaaagtaaacttccctccatcccaggcctgccagcatccctgatgccgactttctgggtgtggcctagggcccctcagtgtaatgtaggggttgtgagcacagactttggtgccagtttgctaggttcgaatcctgactccctctttgtagctctgtgcttcaattgaaatactgtgcctcagtttctcctttataaaggcagggatcatgagagtgcctgtcccttgtgagcactatgaaagtgttagctgttctttaccagaataaatgcatttctatatcttcccatatgcattttgntaatttttaaagtatttcaaacacaaagtttgaaacagaaaattgtgtaacattaactatgaacttaccacccagaatttacaaatgctgacattttgcaatatttatttcngatctatttttaanggggggaaccctgcagttactgnttaatcctttccacccaccttttaattttacaccangagcatagtggtcatacctangctaattttttcagtacctgatatatttggagaactccttcctaggcataaactttgnccctttttttaanagtggttaacctttgggacnaaagggcttgaacaattggcccatccctttgg

SEQ ID NO: 250 - DNA, 669 bp, Homo sapiens
  misc_feature (1)...(669): n = A,T,C or G
ggtacataatccggcagctccatggcatctcgcttctggtgctgtgcctcagccccaatcagaaggttgaaatgagtggccaaatgtcttcgcagcaaagtcttattgggtgggatgttcaataactgagccattgtttctacgttaaaacgaggctctagaaccatgagcccaccatggacaccactgcctctgagattgggcgcatattctgccaagtccacggagcgcagccactccatcactcgatggttagtccacttctgaacttctgatggggcgatggtattctcatcagatggccgcctccgtagacagtttggttcaaaagttattgatcctcaggacctggatggcccttttgatactgagatggtgtancacacttaccacctttcagagacagtaagtcatcaacagtcatgtaatgtaacattcgaccatnaacccggccttnattaaactgggtcttatatttgagggaaggnccatggcattccaaccctntaanggacccnnnttggaaatccactttcccatgaatgggttcntttttnaaaatcccanggcnttngaaaggctaacttgggnggttcnttttcatgaaangaaagcctggattccaaggtcccttttttaaaactttgtggnaaaccctgcaaaaacntn

SEQ ID NO: 251 - DNA, 670 bp, Homo sapiens
  misc_feature (1)...(670): n = A,T,C or G
actattcaagaggtgaagagaaatgtgtatgaccttacaagtatccccgttcgccaccaattatgggagggctggccaacttctgctacagacgactcaatgtgtcttgctgaatcagggctctcttatccctgccatcgacttacagtgggaagaagatcttcacctgcacagacccgggaacagtcggaagaacaaatcaccgatgttcatatggttagtgatagcgatggagatgactttgaagatgctacagaatttggggtggatgatggagaagtatttggcatggcgtcatctgccttgagaaaatctccaatgatgccagaaaacgcagaaaatgaaggagatgccttattacaatttacagcagagttttcttcaagatatggtgattgccatcctgnattttttattggctcattagaagctgcttttcaagangccttctatgtgaaagccccgagatagaaagcttcttgctatctanctnccccntgatgnaaagtgtggtnacccacgggttctgngttaccaaatgctttgggcctgnaanccattgggttccttattctgggtcaaaaattttttaacccgggcnttgggaacttgccaanggnntccaccngagccangaattttcactttgggccaaaaaaccttttgnggg

SEQ ID NO: 252 - DNA, 498 bp, Homo sapiens
  misc_feature (1)...(498): n = A,T,C or G
acacagcacattctcttaagagaaaacaggaatgaacattctcagaaacattcacattgctcatcaaatgtagctttacccaaagtatataggaaatggcaaaaacctaacctagctggacattttatacaagtaagtcaaagttcaaaggaatcatcctatctttattctcagaaatccaatgttgaatatcacagttcttctttaatggaagcagaagattcagagtccttgtctcccaaaatgcctcagccagggtcagcacagagagtggaatataaaaagcttaattgtgttaatacatggaagacaacagttctcagtcaacctagccacaattttctgtcttggccatctgtaagaaatgactaccgtttgaaattcaactttcacattcaaaaaaaagaaaatcaattcagctttnagacacaaagcaaaaccaaaacaaaaaaacnaatggcatagtctacatatttnaccccttgacaattgggggaa

SEQ ID NO: 253 - DNA, 433 bp, Homo sapiens
acgtttcagttcaagtgcaaaaaataactatttgctgaattctatttctttcagttattttatttttaagctgtgttttattgtgaagcgagacatccaagtgtagaatttcttatcccaaatgcagtattgctccttggttacgcttcctggggagacaggggttgctgtgcttgagttcaaagtcaagtccatcatacggttagtaatttcacctgtctggggctgcagagtgggttcactgttcatgtttggagctgttggcaaagtaacggtgtctgagacattgagccctgtttccaaaaggtttcttttctcacgcatttttggtgatatggtgaggaaagaggtaaaggaagaatttgttggcaggataagttaactggtgacttgcattggtggggtgaagttggttgggccaatctttggtacc

SEQ ID NO: 254 - DNA, 652 bp, Homo sapiens
  misc_feature (1)...(652): n = A,T,C or G
ggtacaaacccaggcctgggcctaggaaagggcagaagaaaggcaaagggtcccttggagcaggaacccatccctctctgcttatacccagcacccctcatcccaggttcctttcttcaacctccgcctgcctctgggaacacagagcaccaagaactgacaaaccgggaccctccagggccacagcgtggggcagagtccaggcttctgtctccccgcagtgggagatctggggagctcagtgaacctcctcaccctcctgccagtatgaagttgggaagcgccttctctgtcccccagaacagaacaaactcttgttctctgtggttggggaaaaggtgtggggggcttggacctaggaagaagctgagctgaattcctccagggcccaggtgaaacccccaaggggagtttctgagacttctagacttggccattctccactttttccttccaatgactccggtgaagcagttaaaagtctnggcttagggcaactggtaggacagtngggaatttgncccaagacatttgngggtttcaaatnaaggtttcccaacaccngaatcattatatggancctgccnggcnggccgttcaaagggcnaattcngncccttggngggcgtactaagggaacccactttgggcc

SEQ ID NO: 255 - DNA, 605 bp, Homo sapiens
  misc_feature (1)...(605): n = A,T,C or G
ggtacgacagttgtgtgggtttattgggaacctccaacatctccacaacaatgtagtattgtggaaggcgggtaagtttaatgaacagtttattcttagaaaggtttccaataggatgagttgagtaattggaaagctgcaatgtttcactgcttatcgtaggcagatgttttatagactgcttgcaacgctgttgtccaagccaaaacttaagttgctgaatccagggtatgattcgtttcatatcatcattcacagacttctccatgtcatccagagtggcctggtcaagtccataaagcatcaattgaaacattccagaatgtaaatctacaaaaatgtgcaggcactctgaattaccacagggctccaagatgggaacaacaagagctgggagtgcagtctctatggaagagtttcattggcattgaagcctctaagaatggccttcagttcttggagcttctgatgagctcttgcatggacactggnaatcanggagttttctattgataagtgggccgatcttcatggctctttctactaatttggaatcanaanttgcaaaggaggatcgtgaaaaatttnnaaggtttggaaacatn

SEQ ID NO: 256 - DNA, 654 bp, Homo sapiens
  misc_feature (1)...(654): n = A,T,C or G
acagttcacaagcttcaggcaaggggcagcctgagactatccgagtgatgttgaggcaatccaggcacagcaagtcattcagccacttctccactgcatccccaggggccgtatcggattgactcctggagggaaacctcatgcagtgtccgcgctgatgccaatctggctgtcgtcgtggtcttattctcagcagtggtgctgacctggctctgggcgctctgttgacggagctgctgaattagcttgagggacagtgaccggccagtgccctcatagccattgatggtggatgccatgaaaacaaggtaggggccaagtaggctcttcaccaaggggagggggatggcggcagcttcatcaatcacaactagttcagcctggcccagcttcacagcatctgcaggatgtatatactgaatagtctggctgngtctcgaaatacattcactctgatcactgntttggtaaattcangaattanagactggataatctcataatccaaaggttcctgaaanttgcanaacattnaaatccnttnaatnccaattcaacccaattttgangttttaanggctttggganggaaccaanaanttggggtaccttggccggaacccccttaaggggnaattcagncacntggggggn

SEQ ID NO: 257 - DNA, 594 bp, Homo sapiens
  misc_feature (1)...(594): n = A,T,C or G
actgctcttttattacggtaatacttgctagtgggatttctctcttcaccaaggctgcctttactgtgtgaaggacctgtcagtctggctgcagccaagttggatggagtcctcattcgaagacttgacttagccatttcatgatgttcaatttcagcctttttcatataaaatatttttttaattgaatttgcatccttgaatacttgagagccaggctcattataagttttggcattttttgcgaggagatctatatctttggccattgcatgaatacttttgtagcttccattctgtatcctctgggcaatggtcttgagatctataggctccttaattattgcataataatctggatattgcactttagaaggcaagtttctgaaaaaagtcgctaatgagacgtnctgatggattgnagctaccactatggcttcaagaaactgcttcaggaactncttcaagtaagctggagaaaaatcttnagcactgggncctggatgggcttggccatcttcatcaataacttcgncaattggttctcnttttgaaccaacctcattnttggtccaaggnaccttggncgggaac

SEQ ID NO: 258 - DNA, 648 bp, Homo sapiens
  misc_feature (1)...(648): n = A,T,C or G
cgaggtaccttgctgtttattccttagtctagcagcatccttagtttgtagtatatcttacttagttgcaactaaaaaaaattgctagcctaggctttaactgggagtttctattatctagaaggttactgtgaacctttcagaaaagtggaaagcaaccaaaagagctgtctcaaagactgtgtccccccagagtttgtccagctcttactgtagacactctgaacaggcacggttatctcatgtccaaagctcataacagcacattagaagaaagtggggagcctgttagaagcaggcatattgatagtgtgggagaagacatagcaaattacttagcagatattttaaaaattttaaaatccaacagcagtctgaggcaaatgattctgnatacctcagggctganagaatcactttatacatatttggtatagccctttcattttatgaaagtgtttacataccnnagactngatcctataataataccttatgaatatactttacttttcatcatggaaaatgtgaatatactngcntgatggttaagaagaaggccggagggttcctaccntncntgaancctnccttaaaaataatccnngtttaaanngtggncttggnaaattccttantttcccaaaa

SEQ ID NO: 259 - DNA, 224 bp, Homo sapiens
ggtacttcaaaaagaacatcaggattaatgttcctcagagtatgttctgctgcttgaactttacttaatcctgcttgatgaggttggaagaaaagtctattcatattggctagttccaccttgtcataatcaaagagtagcaacttaccaatgccacatcttgtcagcatttcagcagtcacactacctactccaccaacacctactattgctacggcaaaggt

SEQ ID NO: 260 - DNA, 584 bp, Homo sapiens
  misc_feature (1)...(584): n = A,T,C or G
ggtacttcaaactctcttaacggtgatgctctgacattcactactacatttactctgcaagatgtatccaatgactttgaaataaatattgaagtttacagcttggtgcaaaagaaagatccctcaggccttgataagaagaaaaaaacatccaagtccaaggctattactccaaagcgactcctcacatctataaccacaaaaagcaacattcattcttcagtcatggccagtccaggaggtcttagtgctgtgcgaaccagcaacttcgcccttgttggatcttacacattatcattgtcttcagtaggaaatactaagtttgttctggacaaggtcccctttttatcttctttggaaggtcatatttatttaaaaataaaatgtcaagtgaattccagtgttgaagaaagaggttttctaaccatattgaagaatgttagtgggttttggggccctgggcatcgaagaatggtgtggttcttttctgggaaactgnataatcttaattggacttaatccagnatgatgaagaaaccgcaggaattcccattnggaangggataaatctngcttaattggan

SEQ ID NO: 261 - DNA, 526 bp, Homo sapiens
  misc_feature (1)...(526): n = A,T,C or G
ggtacttgatgttctgcagcttctgaaaggcttcctgatactgctcaggggtgtcaaggctgaagatgctcttccacactgcagtcaccctctccacgaaagacccttcggtgcccgtgttccaagtgtggtaagaggaggagcttttgccctctgaaagctgcttttcctccagatgcctggacagtagctccagaaggcaaaacaccaatctctgaccctgtagactttcatgcagctgcagggcttcctgggctcccacccagttgttggccagaagcagctcttgggcacatctgagagccagggaagcagacaactcatcctctcctacgatggcagccaactctgcagccgttctaagtgatgccgcatccccctttttggccaaaactttggctgcatcataagcacaagtggcccctaaatagcatttggcagctacagcatagtggccatctctttctaggacnggtccccagctgangnacctgcccggcgggcgcttctaaanggcgaaatcttg

SEQ ID NO: 262 - DNA, 703 bp, Homo sapiens
  misc_feature (1)...(703): n = A,T,C or G
cgaggtacagaggctgcaagaaggtggcatagagggctgaaggtctgggtggcagggccactcctttaataaaccaatgtcatgctcacactcctattgcctaccttggcatgctggatcagctcacagatgcaggatcaagtcttgaaagccaatcagaaaatccttcataggcttacaaaggaccacccatggaacattgtttcccgtaagactgaaaagacaaactacaccaaccaccaccactcttctttttcctttttggccccatcaaaggacatggagaaggtagacaagttttcttatccctacttttctaactcgaggattctccaaatttacatcagcagctctaaggatattcctcacaggtcacaaactgaaccaaaaatgaaaatcctttctataaaactacacattctttattcatacntatgactaaaggctactgaatggnacctgccccggccggccgttcgaaagggccaanttcaacacacttggccggnccgtactanatggaatccnaactttgggacccaagctttggcggtaatccatgggccataagcttggttncccgggggggaaaattggtattnccgnttaccaatttccccaccaaccnttcccaancccggaaaccnttaaaggggtaaaanccttgggggggccccaaanggggtgggccttaacttccann

SEQ ID NO: 263 - DNA, 475 bp, Homo sapiens
  misc_feature (1)...(475): n = A,T,C or G
ggtacttgttagcttaccccaaaataatacctggtataccggacccaatatctgctgattgatctaacctaaatgaatacaaaccatttcagaaaaagatatacaatagaccacatatccaggtcatgaaaattaaagctttcaggtcacctagcttagtgactattgcttttctgaccctagactcttgaaagcctatttaaactggcctctttctccacaccaaaactgataaaaaggagactgattatgagccaggatttacacagagattctctatataaggcataaaggtgaggggtgagagagagagagagagagagagagagagagagagagagagacgtgagggagggagagaaaagagaacagacngaagatnagagaaagagaaaggtatacagtctggngcctcaattccagtatgntgatttggcttcaacacccgngtacctggcccggcnggccgntngaa

SEQ ID NO: 264 - DNA, 601 bp, Homo sapiens
  misc_feature (1)...(601): n = A,T,C or G
ggtactacaaaaaccaagtgctcgattaccacttaacatgttcagcttgaaatgactgctacctttgccttcaattccttcccacacacccaggtatacaaatatcttttataccaagagtccttgtgaaagtaaatagagggaactcccagggataagggagggcaaaaaacaggaagcacttgaagccaaaatctggagcaacttttaagaaggaagagacgtccgtcctattttcatatctctgcatggatctcccatggagaacttgagttaaatgtaatgattacacgtggcagaaagacaactctctagcacagtgtttctttcacataggctgctacattcattccataagctcaacaattttaataaaaaatatttctgctaaatactttatattcatcatcataaaaaatgcacagccatttgaaaaaaanggcaattaccctaaatgaatattgcccaaagcacagatcaactttatatanggattctttccttggtctgaaaaatcgcaancggaactggcagactttatttaccaaccatggattttgnccagcatggagttaaatttantgctgtctggagcaggaaa

SEQ ID NO: 265 - DNA, 643 bp, Homo sapiens
  misc_feature (1)...(643): n = A,T,C or G
actatgaaaggcaggtttccttgtctggaggaaaaggtccttgagacaccacaggaaattcacaccgtaagcagcgaggctgtcagcttgttggaagaggtcatcactccccggaaggacctgcctcctttactcctcaaattgaatgagaggcctgccgaacgcctggattacctgggtgtttcctatggcttgacccccaggctcctcaagttctggaaacgagctggatttgttcctgtttatctgagacagaccccgaatgacctgaccggagagcactcgtgcatcatgctgaagacgctcactgatgaggatgaggctgaccagggaggctggcttgcagccttctggaaagatttccgacggcggtcctaccttgctctctaccagttcaatacctnggccgcgaccaccttagggccaaattcacacactggcnggcgtactaatggatccacttngttcccaacttggcgtaatcatggcataactggttcgggngaaatggtatccgttacaattcccacacatacaanccggaannttaagtgtaannctgggtgctaatgatgactacttncttaatgngttggctactgccgtttcatcgggaacttntgccattgntataatgcncccc

SEQ ID NO: 266 - DNA, 582 bp, Homo sapiens
  misc_feature (1)...(582): n = A,T,C or G
actgtttaccagatctttgcagatgaggtgcttggttcaggccagtttggcatcgtttatggaggaaaacatagaaagactgggagggatgtggctattaaagtaattgataagatgagattccccacaaaacaagaaagtcaactccgtaatgaagtggctattttacagaatttgcaccatcctgggattgtaaacctggaatgtatgtttgaaaccccagaacgagtctttgtagtaatggaaaagctgcatggagatatgttggaaatgattctatccagtgagaaaagtcggcttccagaacgaattactaaattcatggtcacacagatacttgttgctttgaggaatctgcattttaagaatattgtgcactgtgatttaaagccagaaaatgtgctgctttgcatcaacagaaccatttcctcaggtgaagctgtgtgacttttggattgcacgcatcattggtgaaaagtattcaggagactgtggaggactccactactanccctgaagtcttcgagcaangtacaccgtcctanaatgtggcatgggagtatattatgganctatgccatt

SEQ ID NO: 267 - DNA, 565 bp, Homo sapiens
  misc_feature (1)...(565): n = A,T,C or G
actttgggaggctgaggcgggcagatcacaaggtcaggagttcgagtcccagcctggccaatatggtgaaaccctgtctctactaaaaatgcaaaaattagccaggcatggtggtgcatgcctggagtcccacctacttggggctgaagcagaatggcttgacccaggaggtggaggttgcagtgagccaagatcatgccatggcactccaacctgggtgacagagcaagactccatcttaaaaaaaagtatactaatgtccctcaagttcttccatatgaggtaaagggatccaagattaaggttgaaattcttaaactgttcaacaattttgtggtgtcatcaaaaaaggaatatttcatatatattaatttaacctcaatgatcaacattgttaaaagtcagtatggagaaagatcattctgacctcttcagaaaccacctggtatatgaacattctgatcccanattattttggganctaaggacnatggtgaaaagaatcncnanattaaaagttctattttcnatggaccttnggcccgngaacacncttaagggccna

SEQ ID NO: 268 - DNA, 661 bp, Homo sapiens
  misc_feature (1)...(661): n = A,T,C or G
cgaggtactacaaaaaccaagtgctcgattaccacttaacatgttcagcttgaaatgactgctacctttgccttcaattccttcccacacacccaggtatacaaatatcttttataccaagagtccttgtgaaagtaaatagagggaactcccagggataagggagggcaaaaaacaggaagcacttgaagccaaaatctggagcaacttttaagaaggaagagacgtccgtcctattttcatatctctgcatggatctcccatggagaacttgagttaaatgtaatgattacaccgtggcagaaagacaactctctagcacagtgtttctttcacataggctgctacattcattccataagctcaacaattttaataaaaaatatttctgctaaatactttatatcatcatcataaaaaatgcacagccttttgaaaaaangggcantacccctaaatgaatattgccaagcacagatcaacttatataggattctttccttggttctgaaaaatcgcaaccgaactggcagactttaattaacaacattgatttggccagcctggagttnaatttantgcatgtcctggaggcngganaaatgatccagaagtaagcaccaccgnctgcngggnccangttcaagaacttaagccnggg

SEQ ID NO: 269 - DNA, 643 bp, Homo sapiens
  misc_feature (1)...(643): n = A,T,C or G
actgatgggaaggccaatatttgatgcaatcaccacagtgagggcagatgccagttcaatactgaagccactagagggtgtgatcggtgtcagatccttccccatggtctggataactcttcttccccaaacccacagaccaacacagataccaacaccaccatagagtagaagccatattggtgttgccacttttgaagaaacatctcctgtgccataaaccaaatataaagcaaccagaggcccaatggcattgcttacgtcattgccaccatgggcgaatgacccaaagcaggctgtaaggatctgcaggaactggaaganggagagagacttcagggcttatcctgggcataccattctttctagaagaacccttactttcttttctgncacctaaacccatctttgnctttgcacttatggctatcttaaaangctnaatgaaagncagacacngcattgcagtaactggggnactgncatttnaantcccttcttggagctgnantaggcctgtcacttctcatttcttngccnttggtaacttttttgnncggatgaatcngagnatgcncatatgcntggattganntactntatggcctaagggtgnncgnggtcctcanttcncttgganaga

SEQ ID NO: 270 - DNA, 650 bp, Homo sapiens
  misc_feature (1)...(650): n = A,T,C or G
gggccacatctgccagagcctggagtctgcgaaggccgggacccggttccccggcccacagtgggggtgtgcaaacccgagagaactgggttgcaaattcgtgaagaatcagcatcatgtttggcagctgagtattggagccaggagcctgccatgaggttttgagaacagagtgctgttttagagctggcagcagcatctcagcccaagagaaggttatattcccagaggatgtcagtcccaaggaccagtagctgccatcagtttggattctgaaaactaactggcatcaacactgggtgtagaaacatgcttgccttatgtatcagaggacatgctcagcaagatccaagagatatatttggcaactttttctagaaaaggcacattgggtatcattcattacattcttgagtttttttgggttttttttttttttttgaacagtcttgctgnattgccangctggaatgtggtggccaatcacancttattgcatcctaatcacccaggcctaagcaatcctccccttganctgggactanggttacagncacctggtaaaattttttttgtgaacggntcttatgtgccagctggnttaggttctnggntnaanggcctctgctannttcaaggcnagccatttg

SEQ ID NO: 271 - DNA, 620 bp, Homo sapiens
  misc_feature (1)...(620): n = A,T,C or G
ggtacacaggtcccaagctctttaaggagcccagtagtaaatcaaacaagccgattattcacaatgccatatcccattgctgcctggctggaaaagtgaacgaaccccacaagaattccatattggaggagctggagaagtgtgatgccaatcactacatcatactgtttcgtgatgctggctgccagttcagggcgctttactgctactatcctgatactgaggaaatctacaaactcactggcacggggccaaagaacatcaccaagaaaatgatcgacaaactgtataaatacagctcagaccgaaaacagtttaacttgatcccagccaaaaccatgtctgtcagtgtggacgcactcacaatccacaaccacctgtggnanccaacggnctgcatgccaagaaggccaaactcgtaatgacccggtgcactggcgtccaagggtgaccagactcgtaaatgatgccttgtggtggatcaaaggtgcacgggggcctanttantggttanctatttggtcctgccggcnggcgttnaaagggaattcaccactggnggcgtctaaggaccacttgnccacttgngaanatggntangttctngggaaanttccccn

SEQ ID NO: 272 - DNA, 670 bp, Homo sapiens
  misc_feature (1)...(670): n = A,T,C or G
cgaggtactttatattactaaatgtctgaagacaaaagagcaattggaaatctctgtttcttgtttcgtcatacataggaaggcgacgtgatgcaaattttaacacaagattttattaaagacgggcaaattggtgaggcatacctgaatttctggagatatacaaatgcgtgaggctggcatcatatgcaaatgtggctttacaaattggttttattttctagctgtatttaaagaggtgttcaaaattccctactaatcaagaagcacccctgaaaaaactatgagataagatagtgttattaatggtttgcatctaaagaccaggaaacacattagccaatacagtccacaatcggtgaaatgctgccgtgcnaaatgcacgtgcatatgcntttttactatattccctnagagaccgtaaaacaacnaccaccaccaaaaaaaaacngtgctcntaaatngnggacnaacctttccaaaccaccgncttactcttactggggtttaagggaattcaggaagcttcntttanccanaaagctnaaccccttcagttcataancttttnccttggaataaggcctgntntggctacctaaaaccaagtctgggggaaaaggactcattccattattaacnnttacncctaagggangaataagggnnt

SEQ ID NO: 273 - DNA, 688 bp, Homo sapiens
  misc_feature (1)...(688): n = A,T,C or G
acacaggtaaccttatgcagcacattgtgctaaaagtatggaacagttaacactttcagccattactgaaaataaacatgtagaaactaagcaacaagttaaaatacagtaatgcacaacttaacaattttaagttttccacatggagcaataaagcaggtaactgaataatttaaggagatgcaaatggccctcttcattcttaattctcggcaatttactcaggaaaataaatttctggtcgcagcccgaacagttccagtccgatctcaccttgatggaaagtcttcattatctgtgcttgcccgaggacttatgaatgnttcttctctttcttttcttctgaactggccccgttctctttcttttctatcctttctttatcatgcctggactccttttggcacccgaaggagaatttaaccatcttctcagaattaaatggaatcactggctttttcnttggcctgaagaatttgacttanttttttncttggctttctcaattngattaaggggattcnccaaggacttttacttttaaggttttgnaaaccccaatnggtncattcttcccctttaccgctcttgggttaaancccggggggactttaccgggccttggttgaangaacccnttttcggtcttttcngggccttttaactttttctcnctttnnctgggagn

SEQ ID NO: 274 - DNA, 674 bp, Homo sapiens
  misc_feature (1)...(674): n = A,T,C or G
atttaaacctggtttggatatgcgcctgtatgaggaagatgatttggaccggttagagcagatggaagattcagaagggacagtgagacagataggtgcattctctgaaggcatcaacaatctgacgcacatgttaaaagaagatgacatgtttaaagattttgctgcccgttcccccagtgccagcattacagatgaagactcaaacgtttgaccgtagcacctggatgaacattaggagtgcttagtcttttttctacttgcttttccaaacactcacagtatatacaacaggcagcggattgnctattgnttgttgntccaacttctgctgccagaagtttaaacagaaagcaggaataatgtgcccattctgaagttgccacaaaaaataagaccctggtgaatgaaaatataattggttttcttctaattaatggaaaaatctgggatatattatatttaaaggtggtgcatttaaagaatgagtattttaccccgaagtggttcccttcatattccccggattgaaggatttganggaccgtaccnggatgggnatgaatttggtacttcatggtcacttgaacccnctaagtnggccntttttggattcanaatcatatggggaacttctttaagccttcaggggccncttaatgccnnnccacctn

SEQ ID NO: 275 - DNA, 638 bp, Homo sapiens
  misc_feature (1)...(638): n = A,T,C or G
ggtactggcatggcaccaacatttgctcagcttctggtgagggcctcaggaagcttacagtaaaggcggaaggtgaagggggagcaggcatatcacatggcgagaaagaggggagaggtctcagactcttttaaacaaccatatctatgtgaattgagtgagaactcactcatcaccaaggagatggtgctgagccattcatgaaggatcccctctcatgatccaaatacttcccaccaggctccacttccaacactgggaattacatttcaacatgagatttggaggggacgagcatccaaaccatatcagatggtgagacaggagaactttgtgtgtccagctgcactggtctgaagatataactaagtccctggactttttctccttaattggagaattcctaatgttcatgatcagcctgantgaccagtggctgactggcctgaaaggggagataaaacngaccacagctttcttcatagaccaatttaacctttattcatctgngcagcagaagggactggnccanatanccatcaggtaggngcttgaatatgggtactttccnanatacttgccggccggccntttaaggcaattccaccaatggggccgtctannggatccactcggnc

SEQ ID NO: 276 - DNA, 638 bp, Homo sapiens
  misc_feature (1)...(638): n = A,T,C or G
ggtacgtcagatctacagcgaacacaactactgccgccttatcctctaaatggggagcatacccaggccggaactgccatgtccagagctaggagagaggacctgccttctctgagaaaggaggaaagctgcctactacagagggctacagttggactcacagatgggctaggagatgcctcccaactccccgttgctcccactggggaccagccatgccaggccttgcccctactgtcctcccaaacctcagtagctgagagattagtggagcagcctcagttgcatccggatgttagaactgaatgtgagtctggcaccacttcctgggaaaagtgatgatgaggagcaaggacccaccgttcctgcagacaatggtcccattcccgctctagtgggagatgatnnttagagaaaggactggcccagctcttgcagtcatccactatgaaggatcctgtaatgtgaccccagttccacactgatctcaccgctgatgctgcagaacaganatttgatgacgaataggcttggngnttatgcctctatgaggaaagtatctngacnagaaacttgaaaccangnttntgtttacagtctttgatggtccatcatcatgannngatgaacgccaaccg

SEQ ID NO: 277 - DNA, 734 bp, Homo sapiens
  misc_feature (1)...(734): n = A,T,C or G
ggtacagagatagatgaatggaaatgggtaagggaggtgttcattcacatccatctaactgcaaaatacaaaagtaagaagtcattgacatgaagcaacgacgaccaagacgttctcagatctaaaggtgaatgatctcagtcagcctggaaatgcacaaggtggaaaaataacataaaaaagccataagaccttgaagaacatcaatgtcaaagataaattctaaagtcccagagaaaaaagaatgggaatcaaattgacctcagactatacgtgagaaacacggagagccagaaaactgtgatgttccatcctcagagtttgaaggaaatatttgaaggctgaattttacatccagcttaactatcaaggcatgccaagtcatgttattcttaggccttcaaggncttngccctttttctcngaaaagcccgaatttnaaatgctcttaaagaccgttcttcaacccngaagagaaaagaaanccngggangggtgctcttgagatatttcagtcncccacaggttncccaaatngggcctaaggaaattccgaagaggtcncgaaatnttnacccattaccttcccccaatnggggaaccccccgacagggntttanccatnggggttaaagggtttttgacccgggggggccttggcaaggtancctggccccgggcgggcccnttcnaaangggccaaanttccngncccccttgggggggccggtanc

SEQ ID NO: 278 - DNA, 586 bp, Homo sapiens
  misc_feature (1)...(586): n = A,T,C or G
acatggtgaatggaccaccacattttacagaaagcacagtgtttccaagggaatctgggaagaattgcaaagtctgtatctttagtaaggatgggaccttgtttgcctggggcaatggagaaaaagtaaatattatcagtgtcactaacaagggactactgcactccttcgacctcctgaaggcagtttgccttgaattctcacccaaaaatactgtcctggcaacgtggcagccttacactacttctaaagatggcacagctgggatacccaacctacaactttatgatgtgaaaactgggacatgtttgaaatctttcatccagaaaaaaatgcaaaattggtgtccatcctggtcagaagatgaaactctttgtgcccgcaatgttaacaatgaagttcacttctttgaaaaccaccaattttaacacaattgccaaataaantgcatttgccaaaaattaatgactttggattatcaccctggaccccaaccataccaaggtggctggctatgttnccaggaagtnaangngcccccttatttggtagaatatatcagtancttgggcgggaacacccttan

SEQ ID NO: 279 - DNA, 664 bp, Homo sapiens
  misc_feature (1)...(664): n = A,T,C or G
accaccgaggctagcacagtcaagcctccagctaagctggatccctgaagcctgctatcatgcagacaggctatgcggctgcctcggaccatgctaggccacttgctggggtgtcaacctaccaccaaaggggtcttttagcaaacctcatggggaacaggaacattcctgttcatccctggccacaggctgcagacccagcactggcccttgcgtgagtcagagcctggggctggccctagccccttctactgacttcctcatttaagccaattatataagctcacattgatcagggagggagggaaagagctaaagagggtcacacaagtggctattttccctgcagtgtttctgtgtggtgaaaataacccagtccactaaggggcgggagtgaatggatggctggattttccccaagctccttatagcctaatgttgtcaggatgtgagtatgaggaatttagcctcttatagtgaaatgagtccaactctgggctttgcttanangaaagctnccgtcaggcttnctataatatgaaaagaagtcaccattggggaactagagaccccagaccttttcatatggatatttgagaatgtaatgcatntangcctngtgctggaactttaggcctntaggcnggttaaaacacttgatttt

SEQ ID NO: 280 - DNA, 448 bp, Homo sapiens
  misc_feature (1)...(448): n = A,T,C or G
actaccacagactgttgacttttagtttcttaaagagaaaaattgcctttttactagaaagcctttgtatattgcaatttttctgtttgggaaaatctaaggatttactgtggttagtcttacagaagaaatgtggatttgataaactagtgcctatgattttaacttatgtttgatatatagtagtaagggttttatgaatgttgattattttgtgccaacagcccagaattgtcacttatatgtaagcagaaaacaatgagctctgcttccaaagttatttaattttctcagtgtttgaatgttattttttgtaagtgtgttaataaaagtgtaaagaattggaaaaaatataaatattcttaactcaagcatttgctggatcatttttctacaaaacttggttgtactgngaacctgtgtatcancgttgtgtaaacctagtacc

SEQ ID NO: 281 - DNA, 677 bp, Homo sapiens
  misc_feature (1)...(677): n = A,T,C or G
gcgtggcgcggcccgaggtacaccttcacagggaatccgcaggcggggatcttcagtctcctttaacaccggaaagtatcaacgggacagatgatgaaagaacacctgatgtgacacagaactcagagccaagggctgaaccaactcagaatgcattgccattttcacatagttcagcaatcagcaaacattgggaggctgaactggctaccctcaaaggaaataatgccaaactcactgcagccctgctggagtccactgccaatgtgaaacaatggaaacagcaacttgctgcctatcaagaggaagcagaacgtctgcacaagcgggtaatttcagggctgatgtctatagggatttagggctaacaggttttcttgatcagaagaaattttgcatgtagattcagcacagggatatcttctagttctaggatgtcagaacatagatatgggttgnatgatatgcatttggttgattaagaaaaatattttccatagtttaatgagaatgaagaatatacccctttgaagcaacaaancatgtgattcccatattatcatggggctagngtatgcncagtcctgcccggcggcgtaaggcaatcagncctggngccgtctnnggaccacttggccactggngacaggcaactgtctgggaatgncctccatccc

SEQ ID NO: 282 - DNA, 691 bp, Homo sapiens
  misc_feature (1)...(691): n = A,T,C or G
cgaggtaccttgctgtttattccttagtctagcagcatccttagtttgtagtatatcttacttagttgcaactaaaaaaaattgctagcctaggctttaactgggagtttctattatctagaaggttactgtgaacctttcagaaaagtggaaagcaaccaaaagagctgtctcaaagactgtgtccccccagagtttgtccagctcttactgtagacactctgaacaggcacggttatctcatgtccaaagctcataacagcacattagaagaaagtggggagcctgttagaagcaggcatattgatagtgtgggagaagacatagcaaattacttagcagatattttaaaaattttaaaatccaacagcagtctgaggcaaatgattctgtatacctcagggctgagagaatcactttataacatatttgntatagccctttacattttatgaagtgntttacatacatcagagctggatcttataataatacattatgaatataactttaacttttcatcatgaaaatgtgaattatactgacctgatgttaagaanaangccggaaggtttctaacatacctgaaatctcccttaaaataattccaggtttaaangtggncttggaaanttccttactttccaaaatntatgacctgccgggggcnntnnaaggngaatccnncctn

SEQ ID NO: 283 - DNA, 668 bp, Homo sapiens
  misc_feature (1)...(668): n = A,T,C or G
acatggttctgtgacatggctggaggtgggcgttctggacaagtaaacaatttactggggaggtgtctgtgtttcacacttaggtcgctaagtttttagccaaggctttagttgtcctccatgagcaattgtagaaattggaaatttgtaatgattttttatgagaaaggccacgaatgtgtgttactattagagtatatccacatattgtccagtcatggaaaatggcctaaaagataatttacctgcaaaacagaatattatgcagctattaaaataatgcatatgaagatttgccatagagtggaaaaatgcttgttaggtaaaaatcaaaaaaacatgtaggaaacaaaattttacatatttgatctccactgtataaataaataaaatggagaaacatttgagaaaaatcatccaataatggttgtctgtgggtggtaaaagcaattgaaatgtcttccttacacttttaataatttttaaaaagtatgtaaaatgccaattatgacaatgctaagctagatgaacatcccattcaaattggaagcccatttaaaatttagaaagcncggttggattcccttctctatccttttttaaagcaaatggcccannnctggngnntttttgacccaacctttcaaaattnggctaactttntgaat

SEQ ID NO: 284 - DNA, 777 bp, Homo sapiens
  misc_feature (1)...(777): n = A,T,C or G
acagtatttaagggattttccttttagcttttcatctccagtggcattaaacataaaaagaccctggcattttttcacatacttgaatccctaaatgcacctgtctttcactttttgagacagactgaatatatctaaaatttccagcaataaaaaaaaagcatttaacttgcaccaagcaagaaaatataaatacagttaactgcattaagataatcacgttaaaattgttactatgcagcacagaacttcattcttatagtattcttgggttcaacctttgaatcaattttaccactgattaaataaatgactcaaagacatctgtaagtcatgctgctgtgttttgaaagtctttaactaaattaagaatgcagaatggatagtgattattcaattagaatttaagtaaggggatggtgatantanaaggctggaaaatnccttaatttttaaaaaaatcagaataggcntttaaataggtaaaatcactttcaattnttccccaaaacctgnangtttcccggaaaaaaggttttaaggctttnaaggtggggaatgncccaaggtttttaacttatnccatggaagccanngccttgcatgggnnccttagggnaacccccngaatcccnttcccaaaaggggggtttacccntttggaattnaatttggggnaaccttattnggnccttnggggnttaccttnggaaanaaaatttnnttttaaatnntttcanggggnnggaaatttaaaggcctttttttttgggaaaa

SEQ ID NO: 285 - DNA, 692 bp, Homo sapiens
  misc_feature (1)...(692): n = A,T,C or G
ggtacaagctttttttttttttttttttttttttttttttaaggatttacttttcttaacaagtgaacaatttgcttctaagcgtcaatgaaaggcaacacctccctntaatggccaaaggaagagagtggcagtaagctggcttttccaatgngtcacacaatccttcatgccattaagttctccttgttggaaaagaaattaggttgttttgataacttagaaaagttagttttagacaacagtgactttcagctacaaatacaaaatcaaatccatgtatataaggcttctgtaatcgatgtcttagaggaacatctgctcattttctccaagccccagtcctataaatcaaggcaagtcaagtaattaagcttcaactattttggcagctttgcaattaaaatgagcnaagcactatatctatccttcatatcnggatatattaaaggtccaacttggtacncccaatnttacatgccgagaggcctaaaatttncnntttgggttccnggtttaattaaagnccataanggncttgcnacnaatctttttcccctncccaagggaaatttccctcnnattaccaaacccctgnctcaatttntttccccggnaatttgaaaggccgggtttntcctttcaaaanaaattttccccggggattaanatttgggccccaatttcttann

SEQ ID NO: 286 - DNA, 709 bp, Homo sapiens
  misc_feature (1)...(709): n = A,T,C or G
actgtgccagggatattgagatgctctgggggtgtattgtatacctgccagttttcttcatttctgaattgagttttcttttcttgatgttggtttccttcatatcacctcaaggtttagatttgtgaaggaataagcatgatggaaataatagtcttgaaaggagatatgttgtatataatcaggaggaagaggaaggaaggacttacccattttgatattttgctgtaggtggccagttttgtttctcatagggaaatctgacccacctgtcatgttggctcctaaggaactgctgttgtaagcggctcatcaagagttgaacttcacgtagccttgttgggaatatggaaaaggaagaaagccacaggactgcccattcagtcttgggaagattgggatgattctgcacaagcaaaaatgactgaagtttatgtatagacacacctctaccaatccatcttcagctgactgaatgttgnatgatacccttcttcaaagcagangtagaatggtcanggttcacccatggaattttctacttaatttcgtttttnggaatcaactttaccnnaatnccaggtcccctttnggaaaaaatccttaaatcttttgcttttttnaaaaaataanttnggttcatanttaaaggcccttggnttaanccanggttncnggtnccnatttatttgaaccctttgcccttana

SEQ ID NO: 287 - DNA, 231 bp, Homo sapiens
  misc_feature (1)...(231): n = A,T,C or G
acaagcttttttttttttttttttttttttttttgtanagatgcgggtctcactatgttgcccaggctggtctcaaactcctgggctcaggttctcctcctgcctgggcctcccaaagtgctgacatcacaggcgtgagccaccacacccagcccctttgggtgtttttaaatataactttggcatttataacaaatgcaaccacatgttanatcttattagaagtacctn

SEQ ID NO: 288 - DNA, 681 bp, Homo sapiens
  misc_feature (1)...(681): n = A,T,C or G
accctctcttccagcacccaggccagtattgagatcgattctctctatgaaggaatcgacttctatacctccattacccgtgcccgatttgaagaactgaatgctgacctgttccgtggcaccctggacccagtagagaaagcccttcgagatgccaaactagacaagtcacagattcatgatattgtcctggttggtggttctactcgtatccccaagattcagaagcttctccaagacttcttcaatggaaaagaactgaataagagcatcaaccctgatgaagctgttgcttatggtgcagctgtccaggcagccatcttgtctggagacaagtctgagaatgttcaagatttgctgctcttggatgtcactcctctttcccttggtattgaaactgntggtggagtcatgactgcctcatcaagcgtaataccaccattcctaccaagcagaccagaccttnactacctatctgacaccagcctggngngcttaatcanggttatgaaaggcaaacgtgccatgaccaangatacaacctggtttggcaaggttgaaactacaggcttacctntggaccccgaggggtcctnaaaatgaagtccttttgacattgagcccaggggtactcaaggntttgttnggcaaaaancttggccggaaccctangggaattnn

SEQ ID NO: 289 - DNA, 565 bp, Homo sapiens
  misc_feature (1)...(565): n = A,T,C or G
actcaacctaacttatagttagcagctggaattctcaactcttccctgccagcactataccacagtgtggaagaaattagtcaaatgcttgttttcctgcttctcttttcagctgttactgtgctttgtttgaaagtagttttctctctcaaagccgttgcttatatcgttaagaatgaaggtttgtgtttaaaatttattgcattgcaaagggtagtttcactgaagtcatgcaccattaaataagatgaaatatttgtatttattgtcctacttcctaagccgtaacttcttttcctctgtgaatttgcattgagtcactcatgctacactacatcgctttagtatttgagatggcatttatgtttcctctcgtttatcatgaaatggggtcagattccatcagattccacctctgtcaggtggactcttgtctgccttccatgatgagatttttttttctccttccctttctttaagagaggctgcngaactangnggcaatcaatttggnaaccagtctctggntttttttcattagtaatttctatcatagttcactggg

SEQ ID NO: 290 - DNA, 699 bp, Homo sapiens
  misc_feature (1)...(699): n = A,T,C or G
ggtacacaattctgcatttctctcttggtaatgggatcccagttttattgcaggaggcagtgtgccagtctcagtagatggaacacgattggtctattcagccatgacaattctgttccctgctgtcttagctttgtttgcagctagaggtgcaatggtagctggctcgggccaagggcatctaagtgaagatatgcagagggagagagcaggaaacagacttctgacgaggttttactttctgatagaaggtgacaggtccagctagtttggcccttcctcttcctccacccctccttccttgaacgcagacatgattcttggggatacagcagccatcttgggaccatgaagtaacgagcactgagattaaggcaaaaggatcaagacgtgacccctaccttcgtggagttggtgaaccaataccattaacccacccatctccagaatccatgctatgtggnaaaacaatcttctggttggttaaaccactgnaattcaaggtttncnttncttgcaactgaatggaagncctttttanaaggtaccttgaccaaaatgccnaaggaancttggcctttggaaattggancccgnaanacctgggtttttaagcccattttggcnncntttnggnaagctttaagggtaaggcctgaacctttggccnaaagggggnaactngggttccccctttcc

SEQ ID NO: 291 - DNA, 699 bp, Homo sapiens
  misc_feature (1)...(699): n = A,T,C or G
ggtacttggggacttcaggcatacagcctgtccagaatatggctatcctactctcctactcagaaagagatcctgtccctggaggctgtaatttggagttcgatttagatattgatcccaacatttacttggagtataatttctttgaaacgactatcaagtttgccccagcaaacctaggctatgcgagaggcgtagatcccccaccatgtgacgctgggacagaccaggactccaggtggaggttgcagtatgatgtctatcagtattttctgcctgagaatgacctcactgaggagatgttgctgaagcatctgcagaggatggtcagtgtgccccaggtgaaggccagtgctctcaaggtggttaccctaacagctaatgataagaccagtgtttccttctctccttccnggacaaggtgtcatataccatgtcattggttgggacccggttctaaatcatctgctggctacattcctgntnacacatacccttgcaactttgangcnngaaaaggtaagtggggccttcctaaggaaaaggnctttccaaggggtcntcaatctttttgncccggntnggntncttnaattgggtntttggaccccnaatttgggaaaccgaaatattnttnanaggctttannnnnggggaanntntttnaaaaccggntccnnnantggccctttnaggtnn

SEQ ID NO: 292 - DNA, 688 bp, Homo sapiens
  misc_feature (1)...(688): n = A,T,C or G
acagtcatcccactacctggctatttcattacttggtgctctagacaagctcccaagaactgactggatcttggcttgttctgtttctgtcattgctaatataatatggaaaacattgctgaaaagaacagagatggccatggatatggctaggttaggtattcatatccaaatatctgaactctaacctaatgtggatatgattctgtagcattatattaaaagctatgatgatgcaatgcaggaaataacctttcattctcccccctagaggatcacgacaggtgcttcaatgcctgccttatctatgggacagtagtgtgattctcagtgagaagtgaaggcctttggggatttgagtcaggaaagggaacatggctaagtgcctggaaactctggcaacagtctgcgggtagaatctacttggcctctggataagaaaatctgtgcttcantgaacttaagnggtttgggaaaatttaacccagaattttnnangaagcataagtncctggttcaaganaaccagcttacggaacatgcacattcttaacatangcaacctttggccaatnaatcccatnggatggcccccttaagggaaagccattttgggttcttggatcccaacnttttaagttcaaactttttttttaagnttttagntcctnggcccctttagnaaggn

SEQ ID NO: 293 - DNA, 572 bp, Homo sapiens
  misc_feature (1)...(572): n = A,T,C or G
ggtactgctctgctaggccagtgacaaatggccatcagagatgtggctcgggtcagcattgtccttcctggtgcaggccatggttttatcagagcactgaccaccctgtggcactgtaacaggtgaccataggagacttgtgcctggagaacttggggccactgtggtaggaacagcaggggttctggaaatggacactaatcctaggattggaaccccggcttgctgtctgctctctgggtgtctcagcctgtctcccacctgcctgggactgttttctcttgggtggattgggaagctcatgtgtggcctcatctcacggggtgaggtgaagactcaatgaggcactacctgggttccacggggtgtcccccgtgggtctctcccccagggtgtccctgccccctgtgcaagccagtttctgctgaattacccagccagctttgccaaaccacctgactttccttcagaagacttcaggcngaaaaacagggttaaagacctaccccttctgaacttggttcantgctantgcanaaccaagtccttcacaancttaggatcctataggt

SEQ ID NO: 294 - DNA, 692 bp, Homo sapiens
  misc_feature (1)...(692): n = A,T,C or G
acttcacaagtgtatgaaaatgatgtgacgttaacggctgataaaggcaaaacagaggacactttcttcatgagcaacaaaccccaaagatacaaagacaagctaccagatagtggtgattctatgcttaggatcagcaccattgcttcagccattgcagaggcatcagttaatactgatccttcccaacttgctgcaatgatcaaggcactttcaaataaaaccagagacaagacttttcaggaagatgagaaacaaaaggactattctcatgtgcgtcatttcttacctaatgatttagaaaaaagtaatggatccaatgcacttgatatggagaaataccttaaaaaaacagaagttagtagatatgaaagtgcattggaaaacttttcaagggctagtatgtctgatacttgggatttatctttgccaaagaacaaactactcaagacattcattccggtggacttaagtgctctagtggnaatgtgaaggccccngaagaaaacncagcagctattgttatgttgaaaatggngagagtgagaatcaagaggcntttagaancctaaacttctcaaatccggttccaattgagagaatacngggccntanttgatgggaaaactgtccnttgcaccaattccagaagtnggacccatnaaaactncctaatttccctccnttggagg

SEQ ID NO: 295 - DNA, 459 bp, Homo sapiens
  misc_feature (1)...(459): n = A,T,C or G
cgaggtacaatgcaacaaaatacaaaatacatgcttggtgaacattcgttcatatctacaagacggcagctagagattaggtttcaatactgaccatttactatcctacaagcaattagcattacatcataatatgccatcaaggcaactttttttatactgaaaaaatcaaaataaaaaccgttatttgtaaacttttatacgaaatgtaactcttcaagtggaaataaaaaataaaatttgtctatttactattgaatacacataggatttcaattttcattataccgagaaaaaagctcttttgtgttgggaaaataatgcttcaaaaaataattagtagaaaaacccactagtataatgntttgcctttcaatgccagcacagatttgggaacatactgaggatgaaagttatagacattcacaggtgaaatgtcctgccnggcggccgtcgaaa

SEQ ID NO: 296 - DNA, 677 bp, Homo sapiens
  misc_feature (1)...(677): n = A,T,C or G
taaagactacctacacatagatatatgattccaaagtcatactttctccatccccacattagccaagtgaatacagggccaaatgggttcttggaatgataataacaaagcattacaaagtgggtccccttggttccagccttgtccagagtttttggttatatatttctatttattacaatttaccttttaaattgtaaaataaacctttgtgtggacagagccaatgtttcaatcttgaatgagtaaagaaaatactttggaactgatcctcattttgaaattggttctaaattattatccatttccaatgtctgaaattctcttacttcctgctaaaactctctttctgccaaagttgtttcgtaatctgtctcaatgactataatgtaaaattaaagaagtaaccatgcttctcaaggggggaattaaaagtggttaatggattttactcaggctaattggttggncagaaattcctaaggccacagctttnggggggtccgtgtanatgtccagganggcagngacattagttccttcttntgntaatcccaaaacttagaaaccnataatcttaccctggcatttcctttntaaaatggccaggccnttgggggggaccttggccggacccccttanggggaatccnccactgggggccgtcttagggann

SEQ ID NO: 297 - DNA, 574 bp, Homo sapiens
  misc_feature (1)...(574): n = A,T,C or G
accgtggtgttagaatgattgttatgtactgcagacaaaatctgcttttagaggcaagcggatttctgacaaagtaactgatcctttggatggcataaattcactttggggactagccttattcttcctctgaggtccttcgttcttcaatttattcaattcatcaatcaaaagtgttctcttcccagttgcaattagaagaagtctttctgcttcagcttcttctagggacccttttccatgttcttcatcaacacagcagttaagagcctggctagcttgatagatcactgtctgttgcatatttatttcgttattgagttcctgcattttctgtttgatattaacttgacaaggaaaggcattatttttttcatccagttttgaagtaacatcttccttccgaacaatcacctgctttattgatggacgttctgnttctttgaatctttgagatctatatgcatcaatgctgtaaagaagatcacgatcttcagaacccaggctatcaccagattcaactcganggaccnagttctttggaattttcctgggtttggactttcatcacttn

SEQ ID NO: 298 - DNA, 535 bp, Homo sapiens
  misc_feature (1)...(535): n = A,T,C or G
ggtacatttagctttggaatgatggagagacacagagatatatgtaaacgtcaagagaatcactccactccacgtctgggtccacacccttccaggctttgtctggaacattatgtggctggtgcctgattccacagtgaggatgcaggagcccaggtggtgatggataaagcattaggagacaatcaagtgtcaggaattggtcaataagaacggcttaaataatgatttaacaaggaagacgagtaaaaaacaatcccatttcatctttagaaagaattaagtcactaaatgatttcttctaagttgttgccatttgcttggatgagatcttgaaggttttccattctttctccacccagttaagaacacattgactagaaatttgtgacaagaatctagtaaaggccttttccctcctgctcctcattatgccaatgcaagaacacttatagcttcctgngccaaagtatttgacatccatgncttcatcttggcctaacttctgnagtacctggccgggccggccgttcna

SEQ ID NO: 299 - DNA, 644 bp, Homo sapiens
  misc_feature (1)...(644): n = A,T,C or G
acatatttcccgggataagatcaccaggccaggagcgaagctatggaagaaaggggaagggctccccaactttgacaacaacaatatcaagggctctttgataatcacttttgatgtggattttccaaaagaacagttaacagaggaagcgagagaaggtatcaaacagctactgaaacaagggtcagtgcagaaggtatacaatggactgcaaggatattgagagtgaataaaattggactttgtttaaaataagtgaataagcgatatttattatctgcaaggtttttttgtgtgtgtttttgtttttattttcaatatgcaagttaggcttaattttttttatctaatgatcatcatgaaatgaataagagggcttaagaatttgccatttgcattcggaaaagaatgaccagcaaaagggttactaatacctctcctttggggattaatgctggtgctgccgctgagtttcaagaattaagctgcagaagactcaggagcaaagaaccccatnttaagggtggagtgtaccattcntcaaatgccactgggaagctgtttaancatttggngtattcaaaaaaaaaaaaaaaaantttcttgccgaccctangnaatcaccctgggcgtnttngancann

SEQ ID NO: 300 - DNA, 642 bp, Homo sapiens
  misc_feature (1)...(642): n = A,T,C or G
accttcccaaccattagagtgagtcaccctagaagcaaattctccagctccagtgcatcctttagataactgccactctggtcactatcttatctacaacctcatgagaaacctcagccagaaccacccagctaagttgcctctgaattcctgagccacagaaactgggagataatgtttactgtttaagactttaaatttggagtaatttgctattcagccatagaaagtgacactcatttcttcgtgcccgacactgctgtctctgtggtttcacatccctgtggttaaagctctccaagggctcatcactaatttcaggataaaatctaaatcccttaacatagcataggttttttacaaactgcctcctgtgtgcctctcagccccatccggcccactctgcctttcctncctggatcactccagctactctgaaacatactgnaccttnctaaatgcngacagataaaattggcagacttttcataggatgcccagtgaaatttgaatttcagataaccatgaataatgngtgtgggtatacaatatttgggacatcctatactaaaaatattgctgacncatattcttcaaggtattaatttaatctgaaatcncatttaatanggcatnttgggc

SEQ ID NO: 301 - DNA, 589 bp, Homo sapiens
  misc_feature (1)...(589): n = A,T,C or G
cgaggtaccgtattatgaactaacaaaatatttttgttttacatcagtcttaatagtcccattttgctcaattgggaatagtgctagctctcttgtttgagaactgttacttcaaaaaaaatccaatgcaaggtgctggtaagtcctcttcataaccttaattaatacttgttagtgatttacagtaaaactgcttttagtgaagtatattcacttggcccataaacactgaaatagatgaggtaatgatacattagtaatgtagtaataaattagtatgccaattctgacaaaaaattaccaatagctccccccaccttcacttacaagagggttcctggtttgaaccctaacataccctagatatacatagcaattctgctgataggaaaaccaagtcttagcacacagctaataaatgacaaacatgggactagaatttaagtctatactgccatgaacctcatgaggaggagccaaattgntaattaagttgcactctagttaccagcactaacanaacacaaaccaataacatgggtgtgggctattnanaaaaaataactgggggaaaacattacttttntgg

SEQ ID NO: 302 - DNA, 577 bp, Homo sapiens
  misc_feature (1)...(577): n = A,T,C or G
ggtacttgaaatgttgctggttaaaagtttttctgctttactcattcctttgacagcattaatttgtgaacatttatattcagttcagctgtatttatggcacaagatctcatttccaaaatggcactaattttccttaagtgtaacagcactctatttttagcagtaattatatttttaaaggttaatttgtagaacaaatgttttaactatactttttttctactctatactccccagttacagtatttacaaagggctgaagtctatataaaaaaatgatctttggctgggcatggtggctcatgcctgtaatcccagcactttgggaggtcgaggcaggcggatcacgaggttaggagtttgagaccagcctgaccaacatgaagaaaccctgtctctactaaaaatacaaaattagccaggcatggaggcaggcgcctgtaatcccaactactcgggaggctgangcagggagaatcgcttgaacccgggaggccgaaggtgccgtgagttgagantggccattgccttcagcctgggtgacaaacgagtttcaaaaaaaaaaaaacatttt

SEQ ID NO: 303 - DNA, 673 bp, Homo sapiens
  misc_feature (1)...(673): n = A,T,C or G
ggtacatttagcccatgagcctggcacagatccctatctagacatgaggccctttagacatgactttggcattgaccagcctgttggcaatgggtcggggaggcagaggggatgctcacaccagtaattctcatcccctgaatgcttgggatcacctggggagagttcacaaaatactggtgcaggggtcccacctctgatgatgctgagtggtgggtctggggtgtggcccaggcatcatgatgtttcaggcccccaggtgacttcttaggcagcccagctaagcccctagagccttgcaatttcccccaaatgacctcagagggcccgatttgagggaaatgcctaacttcaggggcccgtaagaatcccccagggagcatgtgaaatgcagataccaggcccacccccagagatgagctgangtgggtcaaggggtgaaagtgcanggatcaagtgtttttcacaagctccataccttcaggaaatggtgttgtggtttgggcccgtanaaaacattcttgagagtcctggtgncttgtgccttggtgcaccttggggtgggaatnccaatgggnccttgncnttgaggaaggatgtgccattaacctggtaaggggaaacccgaaaccggtttcaacttgnccttggcccaaccggggacccttcnaaa

SEQ ID NO: 304 - DNA, 426 bp, Homo sapiens
ggtactgggctcccatttatttgaaatgtccaaaataggcaaatttgtagacgaaaagtagatcagtggtttcctgcagctgaagtgtaggttgaaagtggagcatgactgaatgccctttctaaaacaagtaaacctataattcatatttccttaagaaaataaaaattttattaaatcaagatttaatttaccatgaagaacacagagttattattagtgcaagactttattcatcctctccccagccaaatcccaagaggatggccacctttggaactttttactggcagcttacttaacctaagtcagtctcctaatctagtggtctttgaaatggggatgtataagacaaccatttgacacaggtagaaaacttttacttttttaagcccattcccctggtaaacaatatatgtacctgcc

SEQ ID NO: 305 - DNA, 655 bp, Homo sapiens
  misc_feature (1)...(655): n = A,T,C or G
ggtacgagattctgtgtgtcagccagtttaccctccagtgtgtcctgaagggaaacaagcctgatttccacctagcaatgcccacggagcaggcagagggcttctacaacagcttcctggagcagctgcgtaaaacatacaggccggagcttatcaaagatggcaagtttggggcctacatgcaggtgcacattcagaatgatgggcctgtgaccatagagctggaatcgccagctcccggcactgctacctctgacccaaagcagctgtcaaagctcgaaaaacagcagcagaggaaagaaaagaccagagctaagggaccttctgaatcaagcaaggaaagaaacactccccgaaaagaagaccgcagtgccagcagcggggctgagggcgacgtgtcctctgaacgggagcccgtagctcaggaggcagaattcaatgtgttatcattgggcagaactggatcctgaaaaattcaagatgctaagcacctacactactttaagaatttggaactgaacatgaanaagaagacngaaattagaatttgggaacctgaatagcttttgcaaaaacacccaagggccggttaatcgtttctggtggtgctnnggtggaatgatncatgggccttgccntgggncaaggggcngnt

SEQ ID NO: 306 - DNA, 684 bp, Homo sapiens
  misc_feature (1)...(684): n = A,T,C or G
cgaggtacaacacgcctccatgtttcagcatctacgtcatgggcttggttctggagtggattaaaaacaatggaggtgccgcggccatggagaagcttagctccatcaaatctcaaacaatttatgagattattgataattctcaaggattccacgtttgtccagtggagccccaaaatagaagcaagatgaatattccattccgcattggcaatgccaaaggagatgatgctttagaaaaaaagatttcttgataaagctcttgaactcaatatgttgtccttgaaagggcataggtctgtgggaggcatccgggcctctctgtataatgctgtcacaattgaagacgttcagaagctggccgccttcatgaaaaaatttttggagatgcatcagctatgaacacatcctaacccaggatatactctgttcttgaacaacatacaaagtttaaaggtaacttgggggatggctaccaaaaggttaacacagtatttttctcaaatgaaccatgccttattgcagaattcttcntttttggaaagaaccaccggccaaaacattccccaacttntgtaaaagctggtggggacctaatggccgcccttaattctgactttgaactggaaanccttttaagnaaaacttggnggcttttntaacaaaatcccgcgtantttgnct

SEQ ID NO: 307 - DNA, 647 bp, Homo sapiens
  misc_feature (1)...(647): n = A,T,C or G
caggtcttgtatacacaagcgtccatgtctcacacaaatattgatgtgattattcttaagtgttaaatcattaacacttaaatgacttcattgggaatattgagcagagggactgtgcttctatgcactgggcaaggcagtatttgcttaggaaactaatttagtcatcagagatactttcctaaaaaggaaaaataaaaaacaaaatggtgccactttgggttgaagctactttgttaggcttgaattcatttatatgtcttttgattcttaaaaaaacaaaaaacattccattagaagcaccagtttttttgctcagactttgtggatcagactctacactcaacacactctaatctacttaaaggtatacaaaatatgctgatcttttttaaattatgatttcctgaatttttttcttaagtcgtctcaactgatttactcacttagcttcctttcctcatcacctagtataatagaatgnatgttacatttttatgaatggcaggtgtcattataatctgnattgacttaaaaaggttcttcctcatgatgctaatangtttttggatanttgggaggatacncatttgacagttttgcattttatgnatgagccngtatccatgacggggcacggattatag

SEQ ID NO: 308 - DNA, 660 bp, Homo sapiens
  misc_feature (1)...(660): n = A,T,C or G
acctttgttgctataaaccagatggagactgtggtgctattttgtattttttttttaatggaagggtgttggggtggcagtttttatccttgaagacctcagatatgctaagtcaacctaagcaaagtatactcggtggaaccctagctctgtggggtgatctgcaaaatagagtatcctggtcatgtaagttcaggaaatgctacagactcaaggattatttttggggattcaccatgcacagcacacattgaaggctgaaaagtccttgcagaaaggaaactgacttaactttgtttcttaaggatatttgaccacaaaacccttagtctgcatcacaccaacctgatgcctnctggaacctgtgttctgtanaatgcgtattagaaaatgttggacaacctgtttcattatcagaagtcccatttctgangacagtggtctctgnctggaaaataanggtccagaatctcaanttccagggaccagncaaggtctggcacttntanccagtaaaaccccattgcataaatcttcattccatcaagggtataanttgcttgngccccttnacaaanggggaaanaactcggaanaaaggtnccttgggccgggaacacccttaagggccaaattccanacaattgnnggccgtaatna

SEQ ID NO: 309 - DNA, 401 bp, Homo sapiens
  misc_feature (1)...(401): n = A,T,C or G
ggtacacatatacacataacaagtgtagaagtatatattacatacatacactcactctgtctggtataggctaattttgaagaactcccataagtttctgctgcttctcccataactgctgccaccaccatcagaattcataatcaaacctaacctttttgtttggggcaccaaatctgaagacaaaattaatttgcaccagtaaacttcaagctgctttctttcttgaaaactaaacgtttaacgtataatgtctgtttggatactgttccaaattgttgattgcatgtggttaatgttgcattagagcactttgcaattgcataattcattaatgttttgtgagcttgcatttgtgagttattggatgatcagactgaattttgcaagtatcacattgn

SEQ ID NO: 310 - DNA, 502 bp, Homo sapiens
  misc_feature (1)...(502): n = A,T,C or G
acatgtttatggggactcctaacacagggctcccctctttttcactaggagtttcacttacagctgacaatctatgggggcggggggggggcgcggcaaaaaagcaatgatggaccttggctaatccccccgacccctttcttaacaatataggtagatgtctatcgtcagcttgcctctttgccaagacctaggaggcggctctgccatgagctgctgtgtgctgccctccccaccttcagcacactcatctacacacacacaggtagcacccacctcgatgagaccgccttgctctggcctgccccaaccctggaagttgaaaacatagagccatttatttctgcttctactctctgngcccatgtcttgtccacgaaactttgctgaacttccaggaccttacacctgaagccccacaataacctggatgttttgaaagccctnggaaanccagttntaganaaaggacccccttaagccgaaacagggcctgttaaaa

SEQ ID NO: 311 - DNA, 387 bp, Homo sapiens
cgaggtaccttactcagaggggctttgatttttttcaagcacaaagcaagaagttccctggattctaaagcacactgtatccaagttcctggtggttgaaaatacctttgacattgtttgcagaacgaaatcgagacttgtttcggaataccttggctgatgtccactttacttcgcaaacaggccacacaaatattggcaggatttggacttatcggaacaccacactcacagcacaagatgtgtccagggctgcggtcggtggattctgccatatactccatcgttctgtatgccttaagttttcgcgcctccagaccagccctggatttgctgaaaacccgcaacaaaatagaccccggctgtcccgtcagctgccaacctggt

SEQ ID NO: 312 - DNA, 654 bp, Homo sapiens
  misc_feature (1)...(654): n = A,T,C or G
ggtacaaaaaaatgcttctggagatttctttggcagaaatgcctttcatctataatttcatggagaactgctttaattagcctaggtgaaaagtagtcctagcagtgtaaatatgtataattagagttttctaatttcactgtgagatctctaacttttgagtggcaaacagatcaagtcttttgctcatagacttttctgtggggttattaaaatgcaaaagctttattttttttaataatgccatactccattagtgtcagatgatggtatggaatttgttcccttgctttcccccactgttactgcttcagtttatagattgccagcagagttcagaaatagagcagggatttacccgttctttgcttggacatcccattttcttttgccagacccatgttggcaatcatgtatgaactgngttatacttctcagtgctttcttttttctttttgataagatggatatcaaaaatagttgctgtgccaaaagtagtaagccttcttcaagaagaaaacccaatctttttctaataataatcctgngaaaatgcttcattcattcatttaatttttaagccaaaggtcaccaaangctgntgnttttaactangaaatttgaaatgnnagnnttaaagcnttttaaaaaaag

SEQ ID NO: 313 - DNA, 656 bp, Homo sapiens
  misc_feature (1)...(656): n = A,T,C or G
acagttctgtcctggcatcatcattcattgtagtatggtcaataggtgccatgaaactcagtagcttgctaaggacatgaaaccgaagtttcctgcctttgctggctttcctatctacttttttgtggattttgcttcgtaacttctggattgcaagccactgccttcccatggccacctgatcgttgggatccaaggagctggtcttccgttctatgagttctcgaaggagctggtggtaaaagtcatcatcatcaaagatttcttcatccaagtccttcagatgagcattagcaggggcttgaggaaggatctccggttcccctggcaaactctctgggacaggctgagctgctggctcaggtttgccaagaactcgatagacagagcgcttggtctgtgtccttcgaagtaatctctctttgnccatcagaatatggtcgatctgagtcaaagattgaaccgttcaaangcaccaaaacccttncccagtttttcagaaacccagtttggtcttatcgggccatttctgaantgtgccggttcctgnaaactggtaaagtcggcaaaacgctttgccatgaacttggaatagncctccatntccggttnctttttgcanggacccttntttggtggntgggtctttttttttn

SEQ ID NO: 314 - DNA, 649 bp, Homo sapiens
  misc_feature (1)...(649): n = A,T,C or G
ggtacatggactggacctgcctggagcccagcccagagcatctcctcagtgctcatctctatccagtccctgatgactgagaacccctatcacaatgagcccggctttgaacaggagagacatccaggagacagcaaaaactataatgaatgtatccggcacgagaccatcagagttgcagtctgtgacatgatggaaggaaagtgtccctgtcctgaacccctacgaggggtgatggagaagtcctttctggagtattacgacttctatgaggtggcctgcaaagatcgcctgcaccttcaaggccaaactatgcaggacccttttggagagaagcggggccactttgactaccagtccctcttgatgcgcctgggactgatacgtcaagaaagtgctggagaggctccataatgagaatgcagaaatggactctgatagcagttcatctgggacagagacagaccttcatgggagcctganggtttagaccctggtccatctcccttccccacttaagaagtccagcagaatcctttccccancccanggatgganangcctgggnatctccttccanaattgaagtcatcttgcaagaaggcaagaaccaagcagcttcgantccanggtgtggaatgggggcctn

SEQ ID NO: 315 - DNA, 238 bp, Homo sapiens
acctgcaggtggtggcagcgggtagccgggactcgggcgccgcgctctacgtcttctccgagttcaaccggtatctcttcaactgtggagaaggcgttcagagactcatgcaggagcacaagttaaaggttgctcgcctggacaacatattcctgacacgaatgcactggtctaatgttgggggcttaagtggaatgattcttactttaaaggaaaccgggcttccaaagtgtgtacc

SEQ ID NO: 316 - DNA, 637 bp, Homo sapiens
  misc_feature (1)...(637): n = A,T,C or G
ggtactgtgtttacatggtgagtggtcgttaccatccaacagcacaaggcacaaaaaatgggcatcaagcaaaccatgcataacgaggcctggaaaccatcaagaacagccacaaaagaggtcactcagacctctgattcaaacttctggtgtttgagtgacaagcatgcacgtttaggctctgcccaaatatcagggaggatttccaatctccacaagagactggtttcacatatggcctttctcctggctgtcaaaccaccagggttcctccaaaacaaaatgagagcagctgttttgctgatcaaccaatcacactagcagttctatttcagtttaaaacaaccttgcaggaataaaccacataaagactccgtggctaagggctgctattacttacacctaccaagcgaacacaaacggctggctcttctatggtaacgcttcactggcatgcaaaccccaagggccactgaatggaatgaatccacatgaacagcatacctggagcaggaacatgccttcacaagaagtgtcaggagactaacctgtggttgctaacattnttgtgangaaaancagggtagcagaagggtgggttgaagtnttgcctaatatncttaccatatatataaac

SEQ ID NO: 317 - DNA, 505 bp, Homo sapiens
  misc_feature (1)...(505): n = A,T,C or G
ggtacattggccagactcatgcacaccacatctgctgacatctccttccgttctgtgtactcattcagctgtcctgaaggatccatctcgaaatagaccagctctcctcctgtcagggcaatcaccacttgtcgctggttcactgcacacttcacaattgttttctttccaggggtcttccactcattgactctcttgtctgctcgtatgtgccgaatgccatctggatagacctgcaccaaggcatcatctcctaataaggagcaggacaaggtcggggtggtccccaggaacccagagtcagtcacttcttctacagtttctccaatggacaacactagggtggcattcacgaaagacacaatgatgtaggcatcaaactcatcttcaatgtgtcgacgcactgtccanacagcgttggggttaccaggtanctcanaaacagccatttctgacacctnaagtccatggtttaaggacttttaaanatgatcngggncccctn

SEQ ID NO: 318 - DNA, 645 bp, Homo sapiens
  misc_feature (1)...(645): n = A,T,C or G
gcgtgtcgcggccgaggtacatacaaactggggttctgtcaatgacaacaaggactatgtgttggttcatatcaaatccaagaatattagacaaccaaacatataaccttcttgtggtttctcttaatatgcagcattcattatggtagttaggtcccttcactggttttctgcaagtctgaagttgtgtttcttgtgtcgttgcccgcatctccaccctcagagctgcttttgttttcctcttctttgcagtctttgtcatcttcatctcctggagatttccgggactgtttagaggatttctttgaagtatatgactttttccgttttgagcctgctttttcattctttcttttgccttttccatcttcttctactctatcaccttcttcctcactgcttgcatctgcagtatttccaccttctcctcagtttctgaaganctctggtgctgaattgcctggtaccagtaaactttactnctgggtattttctatttccacaatccttcgttaaatcctttccgttggttgacttttcaaactggcnttggacctggcccggccggccgtcgaaaggcgaattccaccattggcggccgtactaatggatcnacttggncccacctggcgtaatatggcatan

SEQ ID NO: 319 - DNA, 424 bp, Homo sapiens
acttttccataaagttctagtcacttctgttggcctgagccaccagattatgatgttgccagaattcactcaatttgaataaagatgaacagtatttgttttcttgtttccatgaattatatcagtattctaaaacatcgcttcagaaagagaactgtttatttctgcaggcttcctgtccttttgtggtatggttttttggccttattttcactggcttttccttctccaaactttgaggcgtgatttcattcattgaagaatcaatacatattttgtttcaaaatgtttgaaacaaaagacatagatggtagacttttattaaaacatatatggatgtggaaagcacatatattaatgcagtcatcccttttcaggtgggaagagagcaaaccagttgattttttaattcatccttagtacc

SEQ ID NO: 320 - DNA, 472 bp, Homo sapiens
  misc_feature (1)...(472): n = A,T,C or G
acgaagtcgggcaacaagaaagcgaggagcagcgtgtatgcccttatcctcagcaagtgagaacaaggcagatcacagcaccgacacagaagatggccttctcccatgtgccagcggagaatccccttccagccaaatcctcaggaagcagagcaccacacaagcagcatttcttggtttctcatggtcatattcaaaagcgacttttaaatcagaaaatagaaaaagcatttgtggtaggtctttttcaaacccagaacacaagttggctaggaaaacggaaagcttcctctggcatccctgtttggactcctcctcctcttggaggagtttcctgaaccgcacacacatcgcttcctcaccaagagagatgctcaactaggatcttttttagtgtgccagttacaagacacatttacaggctatgtttctaagacctcttagtggccaacgangaaggagggtaccttcg

SEQ ID NO: 321 - DNA, 588 bp, Homo sapiens
  misc_feature (1)...(588): n = A,T,C or G
acctacctcacaggtttgttgtgaagactaaatgaagataatgcaataaacggctgagacccatgccaagcacatggtaaaagtgtgtaattgcgtattagcagcagcagccagagcaatagccaagggtcaattaactcccagtccagtgttcagttcatgattgtccatgcattaagagccaaagcacccccaaagccatctcaccctgctgaagcagtctaaagtgctcaactaagttggtgcattaatctctagaccagaggtcagcagacgttttctgtaaagggccagacagcaaacattttaggtctctgttgcaactactcagctttgcccttgtgaatgaaagcagcaagacaatatgtaaatgaatgggccgtggcagatttcatccacaggggttccctgctttagactgtgccgagagccatangtcttgagttnaagtccaaccttaccacacttgcaangggtggtctttgaccaagtcnnggaaggnntnccaaaagtcaaggcccttaancctttaaaaaatggggaataataatgccttccntcaagagctggtnaaacaatggaagctgg

SEQ ID NO: 322 - DNA, 589 bp, Homo sapiens
  misc_feature (1)...(589): n = A,T,C or G
acagctaattgaaagtatataaaaatgtgaattagtgtggttgcagctaaaagtatgagtgatgtaacaagaatgacgacgtaatgagtcaagtggtgagactagttctataagcaccgtaaggagtgccagtcctaatacatgaacttcatccatcccttgtatatcaaggaggagactgtggtcagagaatgtattttgtaagctatagtttaaaaatattactcttcagaaatttggagcccaagcaggaattacagagattcctcccaacagaggccctgagatctcccctgactgccacccaaaggatccacacttgcctctgatcaaccagattcaggccaaggcttanaagagggaggaggcagtggccagaagccagggactctagaggagagaaatgatggcagatgtggggttcagaaaaaacacaagacgggaaaggggaagaaggggaaaaaaaggaagaaccaccactggtgangaaattgttnaanaaggccacntttgcttgangagtggcccttgnctttttcaccttgcctgtgggcaaangctggcaagtaaagacaagggcttaaccctn

SEQ ID NO: 323 - DNA, 582 bp, Homo sapiens
  misc_feature (1)...(582): n = A,T,C or G
actgcttatgtaaatcgtttatttttatttcatcaaagcctggcaagtatatgcattccaatttaccattggcaaagctttatttatttttaaggttggatgttgaattaattttgtgggaaaatgagatttgtaagtagttttctttctagataagataacataaaccaagctttcagaagttaaggatgatgaataatattgaaatgacttgttatatattgtaagggttcccttaagtatcataattaacaatttgtggaaattgaaaaagcataaactgtgttatttgattaagtaatatgttcccttaaaattcattttgaggtgtatgttatacacacagtaaatttttgttcaggaatgacttgctcattctgtgtttttaaaaataggaaataaggcatagtgagtcatcattacatcaattaaccnaaaaaatatttcatnccctccgtcactggaaattatctacttcagncacctttcttaatcctcgtgttaggagggccccgtttatgggccttttttaatttccatgngccatattgtccactacccggcagtagcccaaagctanct

SEQ ID NO: 324 - DNA, 180 bp, Homo sapiens
acccgtcggcggcacccaccaacaaccgcgggatcttctgaattgtggctagcgagcagatgtttttgtggccgcagaatggcaggcggaccgtggcgaaggctctgccctggttgaacatttctgtcacttgggaaggcaggtagctggtggaggccatgagcactttcccgaagtacc

SEQ ID NO: 325 - DNA, 575 bp, Homo sapiens
  misc_feature (1)...(575): n = A,T,C or G
ggtacaaatactgggaaaaacctgctcttctgcgttaagtgggagacaatgtcacaagttaaaagctcttattcctatgatgccccctcggatttcatcaatttttcatccttggatgatgaaggagatactcaaaacatagattcatggtttgaggagaaggccaatttggagaataagttactggggaagaatggaactggagggctttttcagggcaaaactcctttgagaaaggctaatcttcagcaagctattgtcacacctttgaaaccagttgacaacacttactacaaagaggcagaaaaagaaaatcttgtggaacaatccattccatcaaatgcttgttcttccctggaagttgaggcagccatatcaagaaaaactccagcccagcctcagagaagatctcttaggctttctgctcagaaggatttggaacagaaagaaaagcatcatgtaaaaatgaaagcccanagatgtgccactcctgtaatcatcgatgaaattctaccctctaagaaaatgaaagtttctaacacnaaaagaaccngangaagaagcatgctcatcaa

SEQ ID NO: 326 - DNA, 584 bp, Homo sapiens
  misc_feature (1)...(584): n = A,T,C or G
accagcaatcttagttacaaaataatacttttcagtagtctttcttgatgcacatttaaaaaccagcacaactcctctagtgaaatggtcaatttcccttaaaaaacaacatctgaaattataagacctgacaaatcatattatatttcaatattagactgctgtggctctagaacaacagaaaagcgtaactttcaaacagcttagggaaaaagcactgaaatgtagatgtcgtcaatcagcctcaggcattattgatcctgtgccatccacacacccttaaggtttttcacagcactctgacggtattatgtgtgttttgcaaatgacgaatcaacagtatgctgaataatcagcaatgaaacacaggagataaattaaatgtgtttttccaaatgtcagaatatcgaggttcccaggagttggcaaaacttctcaaggtgggccattcagactcangctgtgcngggataaggcttccttaccgtangtgaaccggttgagaatattggttccncacacccnagaagccatttaggcatatactgggcaaaaaagaaacctgaatnnaatgggaccaatnt

SEQ ID NO: 327 - DNA, 573 bp, Homo sapiens
ggtacctctctgaagcacacagaagtagcgccaggcagagggtttgaaggatatgtattcatcaagaagtaaacgcaaatccaagatctcaaccacacttggctcttaaagatccaccaacttaacccttatggcatgcatatgtgacttctgcaagaagcaacttgaaaacccaagaatgccttgctctaccacgtcccgcgactgcaaactcccttcctctgaaacaagcagccacagctttataagaaacatgccggcatgtagtccatcctgggaggggagaaatcttcaccactggctgcctttcagcaagttccccttgaaatctgccggcagtggaacagatcccagatcccaacgctgtagcttgggcgtcctcccaccaggggttccttgttctgaaagctgccaccagtgttgttccgaaagatgcctctgcctttgtggggtcatcttccattatgcctcctaacaggaaacaggcttctatggaagagaagagtcccagccccctgacctttccgctttggtcttggaggatctgagtcacatctgccatgttgcctaaag

SEQ ID NO: 328 - DNA, 422 bp, Homo sapiens
  misc_feature (1)...(422): n = A,T,C or G
ggtactattttgaagcgctggaagaagaactggtttgatctgtggtcggatggtcacctgatctattatgatgaccagactcggcagaatatcaaggataaggtccacatgccaatggactgcatcaacatccgcacggggcaggaatgtcgggatactcagcccccggatggaaagtcaaaagactgcatgctccagattgtttgtcgagatgggaaaacaattagtctttgtgcagaaagcacagatgattgcttggcctggaaatttacactccaagattctaggacaaacacagcgtatgtgggctctgcagtcatgaccgatgagacatccgtggtttcctcacctccaccatacacggnctatgctgcaccggcccctgagcaggcttatggctatgggccatacggtggtgccgt

SEQ ID NO: 329 - DNA, 467 bp, Homo sapiens
  misc_feature (1)...(467): n = A,T,C or G
ggtaccactatccccactttacagatgaggaaaaaacaggctcaagagtgaagtccctcgcttgcttagtatctcaaagctaagctgcaagcaaagatggggctccaaggtctgtgtgacctgagctcttggttatccaatacttcaaaactgtcacttaggaaagaagagaacatttttagaaataggagaaaacccaacagccacagtgattgtcaaagagctgagggggcatcagaccaggttcgggggcaccagaccaggttcagggccactgcgtaactgccaatgccctgcccagccccaggagacacgcagactccactgccctagacgagtggccctgctgttaataaataaataaaggtcaggcacaatcctacacaaaggccccagaattcaaaccactgtcttgnttctcagacttttgcttaagagccnagtacctgcccgggccggncgctcga

SEQ ID NO: 330 - DNA, 595 bp, Homo sapiens
  misc_feature (1)...(595): n = A,T,C or G
tcgagcggcccccgggcaggtacatggccgccgtcctggaatacctgacagcggagattctggagctggctggcaatgcagcgagagacaacaagaagggacgggtcacaccccggcacatcctgctggctgtggccaatgatgaagagctgaatcagctgctaaaaggagtcaccatagccagtgggggtgtgttacccaacatccaccccgagttgctagcgaagaagcggggatccaaaggaaagttggaagccatcatcacaccacccccagccaaaaaggccaagtctccatcccagaagaagcctgtatctaaaaaagcaggaggcaagaaaggggcccggaaatccaagaagaggcagggtgaagtcagtaaggcagccagcgccgacagcacaaccgagggcacacctgccgacggcttcacagtcctnttcaccaagagcctcttncttggccagaagctgaaccttattacagggaaatcattaattagccggctttgaaggtggaggcctaaatcatcctaccaatgctgcattgaccttaaagatgacctaggaacacgctggagaaaaaangtggnnaggat

SEQ ID NO: 331 - DNA, 421 bp, Homo sapiens
  misc_feature (1)...(421): n = A,T,C or G
acccaaaaaccacccccaacgccccccaaccctcaggcgtgcctgtgagtgtgtctgtgtgtctcactctgactcacccagacaactgacttcagcagccaaccttggtcattcccagaaccaccactggggggcatacgtgtggctagactgggggcgcccgaatatctgtctctacaaaaaaaaaaaaaaaaattaatggggtgtggtggtggtgcgtgcctgtggtgtcagctgcttggggcgctggggcaggaggatcacttgagcccgagaattcaaggctacagtgagttaagattacgccactgcactccatcctgggtgacagagcaagaccttgtctcaagaaaaaatttttaaatgagaaaaaaaaaannaaaanaaaaaaaaaaagcttgtacctcggccgngaccacgc

SEQ ID NO: 332 - DNA, 616 bp, Homo sapiens
  misc_feature (1)...(616): n = A,T,C or G
cgaggtaccaggctacatatctcggtcagtagctggatcctttgataatgaaggcattgctatttttgcacttcagttcacatactatttatgggtaaaatctgtaaaaactgggtcagttttttggacaatgtgctgctgcttatcctatttctatatggtctctgcttggggtggttatgtatttatcatcaatcttattccactgcatgtatttgtgttgttactgatgcagagatacagcaaaagagtctacatagcatatagcactttctacattgtgggtttaatattatcaatgcagataccttttgtgggattccagccaatcagaacaagtgaacacatggcagcttgcaggtgctttgcattgctgcaagcttaanctttcttgcagtatctgagaaccgattaccaaaccaagagttccagaccctttcnttttgggggatactacttcagngctgggtcctanggcattattgntatcnggtacattgcccctggatggcngttantcntgggaaccgggatncaaaacccntccatatgctanggntgncctaacctacaatnggggcttttttgacaaaaanntggatncctccggggccnn

SEQ ID NO: 333 - DNA, 650 bp, Homo sapiens
  misc_feature (1)...(650): n = A,T,C or G
ggtgggagagctaagtctgcattattttttggaatcattaattaatttgcaatcacagagtcttcaggaaaaaggcaagttatcagctgaagaaaatcccgatgactctgaagttccatcatcatcaggaattaactctaccaaatcccaagacaaagatgtcaatgaaggagaaacatcagatggagtgaggaagtcagttcacaaggtctttgcttccatgcttggagagaatgaagatgatgaggaggaagaggaagaagaggaggaggaggaggaggaggaagaaacacctgagcaacccactgcgggcgatgtatttgtattggagatggttctcaatcgtgaaaccaagaaaatgatgaaagagaaaaggcctcggagtaaacttcccagagctctgagaggtntnatgggtnaancctcnnttcgttttgnntgaagagaacgtggngaggcnaatnttgngtgcctgggaatnataaaaacagctcttttggcttatggccatcttactttancctgattttagggccnaggngcctngaaaatcntgccnttgagtgatgctggccttnaatcccnggccccnaaaaagggttnactggcnaatttttggnnagccttttaancggtttttttgnttcaan

SEQ ID NO: 334 - DNA, 734 bp, Homo sapiens
  misc_feature (1)...(734): n = A,T,C or G
tgntatctgagaattcgcctttcgagcggcgccgggcaggtacagattaacttaacacaaaaacccgaacttcaaaatgaaggtgtgtggaggaaaggtgctgctgggtctccctacaactgttcatttctttgtggggcagggggtagttcctgaatggctgtggtccaatgactaatgtaaaacaaaaacagaaacaaaaaaaacaaggaactgtcatttccacgaaagcacagcggcagtgattctagcaggcctcagggccctgggcctggggaggctacatgagggggagcctcagtcacaggatcaacctggggcccgaaggagcagggttccctgcctctccctctgcaacagatcatcccatccaacacaacccccaaaatgttgatgatgacgcaacatggtcaaccctnaagacctttaagaccaaacagagcagcataggaaaaaaaaaaccaaacgcaccaatttctgcatgtgtcaatggtagggcaccattttnaaaaagtttggcttaaacaagctggctttacttgganggacctaatnccaagcttaattcctttggtaanggaaaaaacccttgaaccccnntctnagcttaaantcttaaggttaagtccnaaccanttaaaacnttctgggttncccctttccaagnttnaagcccccttttccctnaacctggggattgggggnaattnaccnggncntttaaatttccgngg

SEQ ID NO: 335 - DNA, 492 bp, Homo sapiens
acatccttcaccaccatggaatattttagtctatgtagtcaaagtcttctggaattccaaaagttctatcaattttattttcttcaaacccaaattttcttttggcccaagattttattgcgaatatgttatgtatttcttccacaacttgcggatcacagtctttgtatttttctacttctgcctttagctgttccctttggtctcgaagtgaagaaagctcttttgctagcctggttcgctcttccgtttcacatcggccaattttagctttctcaatgcttttctgtaggcttgcatgcttttgacttccctcagacaactgagattccagaacctccaacttatgtttccttgcatgaagagctttacttggaaaagcccaataataattagaagttccgatcctctcacagtcaaccataccatcatcaactaagctttgaaggacttcttttactgacatagcagtaatgcctttctctttggggg

SEQ ID NO: 336 - DNA, 732 bp, Homo sapiens
  misc_feature (1)...(732): n = A,T,C or G
ggtacatataaatgaatctggtgttggggaaaccttcatctgaaacccacagatgtctctggggcagatccccactgtcctaccagttgccctagcccagactctgagctgctcaccggagtcattgggaaggaaaagtggagaaatggcaagtctagagtctcagaaactcccctgggggtttcacctgggccctggaggaattcagctcagcttcttcctaggtccaagccccccacaccttttccccaaccacagagaacaagagtttgttctgttctgggggacagagaaggcgcttccaacttcatactggcaggagggtgaggaggttcactgagcttcccagatctccactgcggggagacagaagcctggacttttgcccaacctgtggccctggagggtcccgggttgtcaattcttggtgctcttgnggttccagaagcaagccggaagtttgaaagaaagggaaccttgggaatnaaggggtgcttgggtattaanccnnaaaagggattggggttcctgnttccaanggganccttttggcctttctttttggncctttncttaaggccccaggccctnggggtttggaccttngccccggngggcccaaggggccnaaattcccaccncanttggggggcccggtacttaanggggaatcccaactttgggnccccaaactttnggggnaaancntngggccaaaactggtttcctngg

SEQ ID NO: 337 - DNA, 642 bp, Homo sapiens
  misc_feature (1)...(642): n = A,T,C or G
ggtacaacagtagaagaagcaacaacaatagtaaagccacaggaaattatgttggacaatatagaagacccttctcaggaggatctttgcagtgttgtccaatctggagaaagtgaggaggaagaggaacaagatacccttgaactggagctagttttggaaaggaaaaaagcagagttgcgagccttggaggaaggagatggtagtgtgtcagggtctagtccacgttctgatatcagccagccagcatctcaagatggaatgcgtaggcttatgtctaaaagaggaaaatggaagatgtttgttcgagctaccagtccagaatctaccagtaggagttctagtaaaactggacgaagatctccagaaaatggagaaactgcaattggtgctgaaaaattcagaaaaaatagatgagaattcagataagagatggaagtagaagaatcttcagagaaattaaagtcctgccnggccgncgttcnaanggcnaattncacacctggcggccgtctagtggattccacttggtcccaacttgcgnatctgggatactggttcttggngaattgtntccgttacaatcncncacttcaanccggagcttaangtaaacttggggcntannagtgctnactcctt

SEQ ID NO: 338 - DNA, 723 bp, Homo sapiens
  misc_feature (1)...(723): n = A,T,C or G
acataaacacacgcatatcacaagtctagtcaagaaagaaatacatagaaaaacaagatagaattttaaaaataatttgcaagggaagttctcaatgcttcagttctaaaatattgtcttcttttagaaaaatttaagactggaataacagattgtttttcctgcaatgctgtaattactgcaaatttatcagcaaagaggtaaacagcaatgcaatttttccttaagcttgaatacataagggaacaataaagaaacctgattagacctgaactaattaaaagtcacaccagtaattttcaggccagctctggtctccaggtagaattccaggacaggtttgnatcactgggtccattcccaacaggctggataggagagtctggagtaattataaggataccaccttcttctatcctgggctgccgactggcattgggcttcacattcccagaataccttctgngngaataggcccttttcagggggaccnggaaggaaggaaaaagggggctntggnaaacatngggggattctttggnaaaatttctggcctggaatngtggcnaacctttggggcttggggtntnggaaaatgtccaaggganctttaangggncccttngaactcggagggnaaaatttaacccctangggcccttgggttnaaaaagggctttatttgggggacccgggttncccttgnaaaaaatgccnccaann

SEQ ID NO: 339 - DNA, 356 bp, Homo sapiens
acaatagtgtaaaggtggtttttaaaaacatagccaggtgtggtggcacgtgcctttagttccagctactcaggaggctaaggcaggaggattgcttgagcccaggctgtgtggttcaccataattgtgtttgtgactagctactgcactccaacctgggcaacatagtgggacttcatctctaaaacaaaacaaaacaaaattacacttaagcactattgtttaatttttaattgtcagtttatcattattttgggtaagacattctggggtttcttgaatcttgtccaaaaaccagttgttttggaaaattgctttaaattgagcatatttatgtatattggataaaaatgtcc

SEQ ID NO: 340 - DNA, 502 bp, Homo sapiens
  misc_feature (1)...(502): n = A,T,C or G
caggtacaattaactgtcacacagtcagatataattcactctgatgaggccagagaaagaaaacaaggcaaagaaagggctcatcttgtccctttaggtaatatccaaatatcccagcacggaaaccatcttttcctcaaaggttatctacacacgtggcctgagaagaaaggcagtaagcctttggggagttggggagaaggaaggaaaagaaaacaggaggaggaaaaaggaagacctcttttctgaaccacaaatgcctcatgctgcgcactccaagctgaaatacagtatggtaggtattctaagggggaaaaaaacaactacatttctttcctattactgattcctctctgcttcacagacccagctcggccaagtggaaaacggctgccatgagttctgcagaagctgcatgtcttgccctggcagtctgaaggtgaagcangcttcanaggtggacagctcaaggagaattcccagaggncnccnaaaagccccc

SEQ ID NO: 341 - DNA, 243 bp, Homo sapiens
acatcatcaccttcttggtcaagttttccatccaacttaattttaggattctccggacaatcaacattttcactgctttctgctgcaattttctgttttggattttcagtcacctcgttttgggcttccactgctgactttctgtcagtagactttacctgctcttcttccttaatttcacttaaatctgtgttctgatacgttaactcttttttaacatctttaagggtttctacgggtacc

SEQ ID NO: 342 - DNA, 669 bp, Homo sapiens
  misc_feature (1)...(669): n = A,T,C or G
tgaggtcaagctttttttttttttttttttttttttttcagctttgttgtagttganattctgatgttcacctaacaaagtccctgacaaaacagacttccttcaatccaggtcataatttgaaacgttatacaataatgagatttaagtgatgaatggaaagaaaagaaggagactgaaaagatatcagaaatttctattngtttttagattcagaaaaatataattacaggccaacatgggtntgacagagaggaaggacgtcagcagttacttgaatgtaaccccttcccagcatttccaaagacctgcaatgngctcattgngatccaagggccttgntacctagtttctaggngatctacaganttgaaacaacccagcacaactttatttcttggagaagatgaacccttaactntgaaggtgcntaaaggaaatnttnaactggtcacttccatgggtccggtttcaaagccacaatcnttccgattaaantaaaacctggganaaaagccaacggngggcaancaaacgggngggattctacntttggtaacccattgaaccgggggcttcnttttaaanangtgntcattggtttggttttanaacctaaanccccttttttnaaaaaantggtgnaaattttccncntntaacccggtt

SEQ ID NO: 343 - DNA, 500 bp, Homo sapiens
  misc_feature (1)...(500): n = A,T,C or G
ggtacagggcagtgacatgagctttgacaaacagttcatgctaggagtagagactgtgtcccaggactgagggatctgcctaagatcaagggaaaaatctgaaagactcgtcctaacaaagtgtaaaactaaggttttataagttcaagggaactgactactgattagctgccagtgaaaacaaaaatcaacactctcaggtaacagaaatcagaattgctacaatgcatcaccaacaatgtccagcttacaatttttaaggacgactaaataggagactcccagtttctagtctggcacataaggaggtcggcagtcatcacttcattctaacaagtaaaaagctgaacaaactaaaaaatcaacaactcagccgggtgtggtggctcacgcctgtaatcccagcagtttgggaggttgaggcaggcggatcatgaggtcaggantttgagaccagtctggcccacatggnaaaaccccggtctacttaaaanataaaa

SEQ ID NO: 344 - DNA, 483 bp, Homo sapiens
  misc_feature (1)...(483): n = A,T,C or G
ggtacttcggccaaaaacaggagcccattgtgacaggcatctggcatcactacaaaggacccctggggctccatggcaaccaggcaggcactaaggatagaaggagagtctgcggcagagattccacacatccggcacacatccttgagctttttgctgattgtctgtagtgaacattctccaaggaggatactccaatctttaagctccccatggccaagacgcccaagtcgcccgattacaactctccagggtagagatgtcatttggacaatccctatgcaccactcccataacttctgtagtccaattttacgtgcagatactttactcctccgtgacctaacaaataaagaaatggggaaggggaaggggtccctagataaatcagagttatttatcacttataagaccaacactagaaatttccaagaacctatccatgctgnacctgccnggcngccgtnnaaaggcgaantcagc

SEQ ID NO: 345 - DNA, 667 bp, Homo sapiens
  misc_feature (1)...(667): n = A,T,C or G
ggtacaggagagaaggctcttatgaccgatacctacgaatggatgactattgcaggagaaaggatgactcttattttgaccgttacagagatagctttgatggacggggccctccaggcccagaaagtcagtctcgtgcaaaagagcgtttgaaacgtaaggaacggcgtagagaagagctttatcgtcaatattttgaggaaatccagagacgctttgatgccgaaaggcccgttgattgttctgtgattgtggtcaacaaacagacaaaagactatgctgagtctgtggggcggaaggtgcgagacctgggcatggtagtggacttgatcttccttaacacagaagtgtcactgtcacaagccttggaggatgttagcaggggaggttctccttttgctattgncatcacccacaacaccagatcaccgntcctgcacaggtcaacatcatgtttggaaccccgnaagaaccttgnaacatgccccaagncnatgccatggtgctggtggccanaaatttttagccgttccaggaattaattcccggaanaaggaacctnagggnaatgccnaaccggccntcaaanngcccatgaaaccttcttgcggaaaaaaaaagggggcctnaggagggatccttggggcccctttaancnttcaancnn

SEQ ID NO: 346 - DNA, 754 bp, Homo sapiens
  misc_feature (1)...(754): n = A,T,C or G
actgaactacttcattaccaactcggcccagatattgacatgcctgatgataacaaaagaattagaagggtgcgtctcctggtggaagagggctgtgaagatcgaattctggtagcacatgacatacatacgaaaacccggctgatgaaatatggaggtcacggctattctcatatactcaccaatgttgttcctaaaatgttgctgagaggcataactgagaatgtgcttgataagattctaatagagaaccctaagcaatggctaactttcaaataggatggttgcttatgaattcacaccttgagtataaaacttgcagagaacattcagcgatttccagtccactgtgagatattaatcagttacctaggactaatgacagatcatttccttctgatgagaactaggaggggtttgccttctctgagacccagctattacaactgggccctntaagggaggtacttaagcctaaattgagcccctaataatttnaacttaacccaaanttaattnccggaanttcccttngggccgggaaaccacnccttaaggggccnaaatttccagcnccaacttgggcggggccggttacttaanggggaatncccaaactttggggnccccaaanctttgggcggaaaaccatngggccctaaacctnggntnccccngggnggaaaaatnggnaattcccggtttnanaaatttccccnnccaanntttttcnnaaccccggnaagccnttaaa

SEQ ID NO: 347 - DNA, 444 bp, Homo sapiens
accgtctcgatcatctgcttcccttgggctgagagctccaggggtgactcgaaggtgaccctataaggagtcatgagggtcctgaggttctggaacagcttctctccattggggttccccagaatgtagcagcccatgatgtggatgacgttcggctctgggttcactttgctcatcaggcggctcagccgcttccagaagtgaatcatgtcctcttccttctccactttggcaaaggtggccaccttgttcttgaggagatagaggtgtccaggacctccctggcagaaaatcagcattttccagatcttggctcccttgtggtagacgttcagcttcctctctatctcctcaaggatgtcctcgaaggttgcgtgctcatggtccgtagaggatggggatgatggaggggtcatccccggcggatgatagtggggatgtacc

SEQ ID NO: 348 - DNA, 693 bp, Homo sapiens
  misc_feature (1)...(693): n = A,T,C or G
ggtactttaagaccctttgccttaaagtactataccaacacagactttatagtatgtttaaaaatcccaactgcaagatacacaggatgctgtaggcctgatttcctgttgtagaacctccagccctgtgttgaatgaggaggtgcaaatatatagacccttaagatcagaccacagcaggcattcaggtggaggggatgaactccattcattccagctgtgcagtgggacatctgcgccctccgcatctcggctcattcctcatctgagccactcaagagggcggtctggtaagtgtcatctgaattcagcttctgaattccaatgatttctccccttccgtgtctcttcatccgagtcaaaaggcagtaaacaagagaatagttgacggccacaatgctgaaggcagcaggtagtgccagcagaaacacatggtgatgaacatgaaggtggcatcatccttctggnccattcnggtggtncaaaaggtgggaacnggacaaaccncaattttgccnaaccangttccntgnaaaatgattaaactgggtccggaaaaagttccagcncaatggnggtcccggaaanatcnccntttngggggantcttacnccnccttttgaaaagggctttccncnggaatgaanngaatnncttggnccaacggaaggcccgtttgnggcntngtaatn

SEQ ID NO: 349 - DNA, 299 bp, Homo sapiens
cgaggtacattctctaaaaattgttactgactggtaagaaatagacctgagtttttatttctaacacccaatcactaaaccacggcagcaagcactggccaccgatttaatggattacgacacaggaaaccccatcagggttctatgtaatttagtgatactcatgtcactaatattgagcattatacttgatctgcattatattgttgatatgcagaggctaaactagtcatcatttgctctttcatctatcagtagagtccaaagttgtttgcttgaatggactacatgttaaaggt

SEQ ID NO: 350 - DNA, 622 bp, Homo sapiens
  misc_feature (1)...(622): n = A,T,C or G
actgtttaccagatctttgcagatgaggtgcttggttcangccagttnggcatcgtttatggaggaaaacatannaagactgggagggatgtggctattaaagtaattgataagatgagattccccacaaaacangaaagtcaactccntaatgaagtggctatnttacagaatntgcaccatcctgggattgtaaacctggaatgtatgtttgaaaccccanaacgagtctttgtagtaatggaaaagctgcatggagatatgttggaaatgattctatccnnngagaaaantctggcttccagaacgaattactnaatncatgntcacacagatactttgangcctttgaggaatctgcattttaagaaatattggtgcnctggnatttaatancnnaaaaagggctgcttgcatcaatagaanccattncttaggtnaagctngtatnactntgnattgcacccctcatttgcngaaatgtcnttcnngnnaactntggtacggaactcctccatncttatcccngnaagttntccngagccanagggtncnaccntatcctatanannagntcnntcnggacntnatcnnctttngggnnccntagtggccctttncc

SEQ ID NO: 351 - DNA, 574 bp, Homo sapiens
  misc_feature (1)...(574): n = A,T,C or G
gctttaacaatagcagcagacaaaggtcactacaaattttgtgaactcctgattcataggggagcccacattgatgttcgtaacaaaaagggaaatacgccactttggctggcatccaatggaggtcattttgatgttgtgcagttgctagtgcaagcaggtgctgatgtggatgcagcagataaccggaaaatcacacctcttatgtcagcatttcgcaagggtcatgtaaaagttgttcaatatttggtaaaggaagtaaatcagttcccttctgatatagaatgcatgagatacatagcaacaattacagataaggaactgntgaaaaaatgtcatcaatgtgtcgaaaccattgtgaangctaaaagaccacaagctgcaaaagcaaataaaatgccagtntcttttaaggaacttgatctggaaaagtcaganaaagacngaaacagctttgtgtaaagagaaaagaangaaagagnaagaatagagaccgaaggactgagaatanaacactaggatcgactccagtaataaggattaattgnaantctaactttnccctcatgattgn

SEQ ID NO: 352 - DNA, 399 bp, Homo sapiens
ggtacataatattccagtaggaaactgcttccaagtttaagcatgagctccccaaactggagaaaacatattttgctattctgagacaacaatcagaatacagactttggattccaggtcacagtttgctttttagacaaggtaaagcaaagaaagccacattgtgccatcttcagctccagtggctttagcagtgactgtttgacataaaacatgtaagaattgcttgttgggaagagtgctttagggacccactgttttcatttcttcttggagtttaccttgtttcagatgcagccatgggtaggtcagagatggactgttggtgcaataaacccaagaatcaatgtagcctcttaatcccatcaagatgtagtttgtagcagcaaaagtgtacct

SEQ ID NO: 353 - DNA, 727 bp, Homo sapiens
  misc_feature (1)...(727): n = A,T,C or G
ggtacttttacccatttccagttccacctttactttatcaagtggaactttctgtgggaggacagcaatttaatggcaaaggaaagacaagacaggctgcgaaacacgatgctgctgccaaagcgttgaggatcctgcagaatgagcccctgccagagaggctggaggtgaatggaagagaatccgaagaagaaaatctcaataaatctgaaataagtcaagtgtttgagattgcacttaaacggaacttgcctgtgaatttcgaggtggcccgggagagtggcccaccccacatgaagaactttgtgaccaaggtttcggttggggagtttgtgggggaaggtgaagggaaaagcaagaagatttcaaagaaaaatgcccgccatagctgntcttgaggagctgaagaaagtaccgnccctggcttgnattggaccgaagttaaggcctanaatccaaatgaaanaccnaaanccccttggtncaangccnccagacccanggccccataattttttggccncngggggattcaaatnnccnttttaanccncgacttgggnccncnaaattcncgccnggggccnaaanaaaggggtanaaagggganccccaanagttacccttgncccngggcnngggnccgtttttnaaaanggggtcnaaanttcccatntcncattggggggggcccgttttcttagggggaatcccgagctttggggnc

SEQ ID NO: 354 - DNA, 411 bp, Homo sapiens
  misc_feature (1)...(411): n = A,T,C or G
ggtaccataggtcatttctggccgatagtctgaatttacagcccattgctggtgaaagtttagtaattttaaattgtttctgtgagcccatgtaacactgacaaaattctccatttccttttccttcatcccattctaatacaaagttttggattttagaaccattgtcactaggtgccttccattgcaaagtgagtgaatttttggtccgattggctatccttggtggattaggtatatcaggttcacagctcaaggtggtaaagatttcagcctctgaaggagttccctttatagaattatattctgcctggacttttgcatggtaatccatggctggcttgagatcatttaaagtgatatttgnttcttctctacatatacacttttggatttcccatcttttccagt

SEQ ID NO: 355 - DNA, 331 bp, Homo sapiens
ggtacttttctctatctgattcagccatttctgccagagggaaaaggtcggcagaaaagatgtattgagtgaatagttaaggataggatctttgtccaaaaatttcagaaagattgagcaaatctgacgtattcattgagtgagtttctgtgttttcaaaggtggaggagaaatttgtgctggaagtttttaagcctccgttttcttggaaatcagtctgtaacactggcaagtcttaagatagtcccgtttagactttgcagatgctgaacctggctctgtaacgctgggaagtcttaagatagtcctgtttagactttgcaaaccctgt

SEQ ID NO: 356 - DNA, 678 bp, Homo sapiens
  misc_feature (1)...(678): n = A,T,C or G
ggtactttttaattcagcaccttttcaaaatatgtgctgggatggattcttcttagggaaagccccatatagaattctcattttggagcatcatttttatatgctatctccccagtgtatcttctcaatatttataacactttatgaaataaatattgggttgcctgtaagaagagaaaaatatagctctttctgagaaagagcatttggcttgcagtttacagcaagagctgaaattagagaccatagggatttccaagaccaatttgaccagaaatacaaaaattctgatgtcaaaaaccctctcacaaaatttaacaggtagaaattattttagcagtatagcctgaaatccagtgcaacaaaaatgnatcccaattctatgatatgncataagtatgntctcttanctggcttnccttacttggtcctactccctacttggacctttngggaagaaaatggtcggcccaancccatctttcaaattttcnaattccttaatatggaacccttagccatggaataaccaggggcnttaaagttccccccatttaaataatgncccttaatntggnaaanggcttgaaancctggnccaaagggctggggtcttttaagccctttgaaggttaaccttcaaaagggggaaaaaaccnttttttttttaagttgggg

SEQ ID NO: 357 - DNA, 414 bp, Homo sapiens
  misc_feature (1)...(414): n = A,T,C or G
acaccgagaaccataatgaaaaaaccttccgtgtgttttgtcatgttttgttccagggaagcagttgatgagtgctgttactaatgctttctcccagatccattcagtggtggagaggaggaaaatgggctggttggatgtggtcttggtgccttgcagttactctgcactggttatgcatttaattctcctcttttctagttaaccttttgccagtgggttttccatagtctgggtatttgtccttatatcagttataccacctaaggcaactgggtgcaaaatgcattctgttcactcactgtctgggccttccccaccctagtcttggcacattccttcaagaatgtagttaccgtctgcttgggaagatgtcagtgcaaatgtgaagataatgggcatcggnaaacccct

SEQ ID NO: 358 - DNA, 633 bp, Homo sapiens
  misc_feature (1)...(633): n = A,T,C or G
cgagggtacttcaaagaaagtcaaatcctaagcctgcccaggcccaaagacaaagccagccaggacctgaccacctgtatcctcttggtggcaatctgctgaagccagatgagttctgctttttaattccaatcctattctgccactgaaactaggcctgggcaaccactcttaatcattaacatatcaaaaggagtatctcctctgagaaaagagcttttctcaggttctagaagctagcttttacaaaagacgtcttcaaataggggccgggtgcagtggctcacgcctataattttggcactttaggaggctgaggtgggaggattgcttgaggccaggagtccaagaccagcctggacaacgtagtgaaacatctatttctaccaaaaaatttaaaaaaggaaaaaattatgtcctaaaatattaaanggncattaaaanggcccactngaacttggaactttggggaatctagtgcaacaaccccttgccgganagaagaancttnaaccagctnttgaattgccnggtcaaantggtttatattaaaaccgataccactttttnataatcctttggnaaatnaactgtaagccntttttccctgaacggaccntgcctgcccaattt

SEQ ID NO: 359 - DNA, 635 bp, Homo sapiens
  misc_feature (1)...(635): n = A,T,C or G
acagattcttttagaagctggggcagatcctaatgcaactactttagaagaaacgacaccattgtttttagctgttgaaaatggacagatagatgtgttaaggctgttgcttcaacacggagcaaatgttaatggatcccattctatgtgtggatggaactccttgcaccaggcttcttttcaggaaaatgctgagatcataaaattgcttcttanaaaaggagcanacaagaaatgccaggatgactttggaatcacacctttatttgtggctgctcagtatggcaagctagaaagcttgagcatacttatttcatcgggtgcaaatgtcaattgtcaagccttggacaaagctacacccttgtcattgctgctcaagagggacacaccaaatgtgtggagcttttgctctccagtggggcagatcctgatctttactgnaatgangacagttggcagtttcccnatcatgccagnttgcccaaatngggccntncaaaaatcttggacttggtaatnccccttaactnaccgggncctgggacccttggcttaaccaaagtnagnccttgttaattaanaaaggtttgggggncttgaaaantgcttnnaantnttctccggaatgggttcng

SEQ ID NO: 360 - DNA, 403 bp, Homo sapiens
  misc_feature (1)...(403): n = A,T,C or G
aggtgaaagttcaccgagtggtgctatgggcctgtccgggtgtcgctgtatgacctggcttctgtggacagctgtgaggagaactcagtgctggagatcattgcctttcattgcaagagcccgcaccgacaccgaatggtcgttttggagcccctgaacaaactgctgcaggcgaaatgggatctgctcatccccaagttcttcttaaacttcctgtgtaatctgatctacatgttcatcttcaccgctgttgcctaccatcagcctaccctgaagaagcaggccgccctcacctgaaagcggaggttggaaactccatgctgctgacgggccacatccttatcctgctaggggggatctacctcctcgtgggccaactgtggtacctngggccggaccacgc

SEQ ID NO: 361 - DNA, 631 bp, Homo sapiens
  misc_feature (1)...(631): n = A,T,C or G
ggtacaagctttttttttttttttttttttttttttttttcgtttttaaaaactcgggttttatncaatagaatgttttntagcanatgcctnttgttttaatatattaaaattttgcaaagccntttgagctactgccttagtctacccactgtcctttngttatgaggtanaggatntcatgacaccatacacacaaacccatcattgcctgtgaatgcacgtagggccanaattcctcagttcccgctcctctgagggttgatactgctgggaatgccaaccantncacaagcanagggaagccccntcaggcctncaggaggagccgcagcagggggtccaattnaaaccagcngcaaaagagcctgacattttcccatccatntatgaggaaagccattttacagaacntggacatagggcacttgnttttcccacacnaangggatgggaattttctacctatagncattccttgnacttctgganttactcangaccanggnccaactaaanggcaaaacccttttggntctttaaccagaaaagcantnctnnggactggggacctncccgggnggccntttaaaggngaatttccnnnnttggggcggtntaggggaccang

SEQ ID NO: 362 - DNA, 660 bp, Homo sapiens
  misc_feature (1)...(660): n = A,T,C or G
ncnggtacctcanttgnctgcttacgctnnanccagcatgtgtgagctaggtcatttnctgcaagccaggcaaccacaccagngtataancctcaagcaaatgtnactccnaagcccnanatgggactaaggcctttgctgggctaggcgtggtgtaaancccangcctgnaagctnntacccaaccntaattagtntcancttactntcaatatgtgcatantttcataaagcacacattnncatgaggaaaagangatggtggtgaaagggnaggggtgangggacatnttcaagtcacanaggctgnanaactcagcatgacttgtggacggaccacaggncatncagggnnacaacacngacataactcaaccagtggtnaacngntctaaaccagggtnaacaggagangggaccaaangnaacttcctggatttngctgcaagtttaaaagataagttctaccttagctttaagcttagncccttatgggggcaaaaaaanggnaaagtcaattcttgccncaaatccaagcttgggccngccaaaaaagggaaatnggggttnttaggccccaaaacctnaattgagntcccaaggnttcaaggcccaggcaaattgnaaagttcctgccttnaaagcttggnccaataaaaa

SEQ ID NO: 363 - DNA, 486 bp, Homo sapiens
  misc_feature (1)...(486): n = A,T,C or G
ggtaccttcaaccttctctattttaatctgaggggaaattaagagaatctcaaaagttactacagagtttgggtaggctagatacatttattaatagtaaaagcaaccatggcaaaagcaaccatactcattcttgataatgaaaggatcttctatatacaaacctagcaaattaaaaaaaaatactaaaacaaagtgtctgaagataatgaaaggcagttcaattcatgtaatgtcaagtaactttcaattgtaatagaatcatttatattcttatagtgccttacagcatattttatcgttaatgagaaaatgaaccaaaactatagtgctaaccctgaaaccttaaaccgaaccttacaaagttaaagactaagtgttggtcagaaggaaaaggatgcaccatgcatcttcacagggaaaaatgaaaatagcnaagatggcagaaatgcctgaactcatgggtacctgcccggcggccgttng

SEQ ID NO: 364 - DNA, 686 bp, Homo sapiens
  misc_feature (1)...(686): n = A,T,C or G
ggtgctcggaataacttcctgcagcgaccaacaggctaaagagggggaaggtctggagggatccagcaccggctcctcctccggcaaccacggtgggagcggcggaggaaatggacataaacccgggtgtgaaaagccagggaatgaagcccgcgggagcggggaatctgggattcagaactctgagacgtctcctgggatgtttaactttgacactttctggaagaattttaaatccaagctgggtttcatcaactgggatgccataaacaagaaccaggtcccgccccccagcacccgagccctcctctacttcagccgactctgggaggatttcaaacagaacactcctttcctcaactggaaagcaattattgagggtgccgaccgcgtcatcactgcagaaaccgtgcaaggcagaacccgatcagaactaccaattccaccagcatgccgtattcccacttggcttattggtggggaaataccttgccngggcnggnccgttcaaangggcgnaanttccagctcacttggccggccggtacttaatggggatccnaaactttggnaccccanacnttggggcgnnaatncatngggcaaaaattggntnncnctgggggnaaaatggtaatnccggttcacaanttccccccaattttctanncccggaagcttaaagg

SEQ ID NO: 365 - DNA, 639 bp, Homo sapiens
  misc_feature (1)...(639): n = A,T,C or G
ggtacatcctaaagcattctggtacaaatgaaatggaactgcctcttgtgggtctatttcagaagtctgttgtcagagttcagttcacaggcatcaaccagaagcctagtgaggccgtttgaaattctggcccagattaattttttaaagctgcatttggagctttttaaagtcgagctgtttccaaaggcttaactgaagagtaactgatttcactggaaataaaagtccacatgtgatcccagctggagtgtggtcatatttttcttgcaaacctagaatgtcttggggaacaaacggctgtcacgtgtccccttccaaaaatgtcttaaacaccggaaaggagggcaggctaaggtgtagcccttcccaccctgggtgccagggttgggggtgctataagtgaaatatcaaagcttgaggcactaatattctgaatttcagcctcaaaggangganngtntcnngaatcnangaaggaggggaaggacccaganacggggaatggcctggatgggatnaatccannacntggggnaaagctggtttcctgaataatgnggtcntggggaccttgcccggccggncgttcnaaaggcaattccaccccatggnnggccgttactaaggggntccgcn

SEQ ID NO: 366 - DNA, 586 bp, Homo sapiens
  misc_feature (1)...(586): n = A,T,C or G
cgaggtacaaaattgcagatagtggcttactgagtttaagatcaagatcagacttaaactcaacaagatcaccaaaggtatttctactgagttttcctatgtcccacagtaagctgggttagagagaactcaaattcctgatggaaaacaaaaccgaacaaaaaaactagaaaaaaaaggtgttaaaaatgctgtgtaagttgctgcaaaaggggaaaaagaatagacactaactccatgtaattttagacatgcagcttttgtgtttttttttgtttttgtttttttttttttgaaaaaaaccagtttattttgagatcagtgaaaagagtctangccacagaaaagaacagctctttaatgcaagttaaaatgtgtaaatgaatgacccgggacacttgacacctttagatgcagacttcattcggcactggttggctcagacttgccggcngccgttnaaaggcnattcaccnctgcggccgtctantnggtccaacttgtccaactgnnaanaggntanntgtcttgggaaannntnntncattcncnntnaccgagctaagntagcgggngnntgnggnnn

SEQ ID NO: 367 - DNA, 628 bp, Homo sapiens
  misc_feature (1)...(628): n = A,T,C or G
gcttcctgaggagcaggccagaacggaagtcttggttttatttatagttgataacttacatccggcctgctcctcaggaagcacagcagggaggagacagagcccaaaggagacggcgacaaaaatgcccaaacccctgagctaatgtggtgactgagagcaagcctaaagctcccttctgagctccccagcagccaaagcaaagagagaaacagggtcctgcagcatgatgtcacagaaaaccagggaccctggagcctgggttccaataagaaccttacattctgacgccttagatttctccctggaaaatggggagaaaaatactgaattggttgggagggccatgcaacacacccagcacagtgtctggatgcatttcagaggccccaccagtctagggtctacagaaagacagtaccttnggccgngaccacgctangggcgaattccactcactggcgggcggttctaatggatccnacttcggaccaactttggcgttatcatnggcataacttgnttcctgngggaaaattggtatcccgnttcaaattnccccccanttctaancgaanncttaangtttaaacctgggggncaaataagngcttacctcctattgggn

SEQ ID NO: 368 - DNA, 618 bp, Homo sapiens
  misc_feature (1)...(618): n = A,T,C or G
acaattcatagggacgaccaatgaggacagggaatgaacccggctctcccccagccctgatttttgctacatatggggtctcttttcattctttgcaaaaacactgggctttctgagaacacggacggttcttagcacaatttgtgaaatctgtgtagaaccgggctttgcaggggagataattttcctcctctggaggaaaggtggtgattgacaggcagggagacagtgacaaggctagagaaagccacgctcggccttctctgaaccaggatggaacggcagacccctgaaacgaagcttgccccttccaatcagccacttctgagaacccccatctaacttcctactggaaaagagggccttctcaggagcagtccaagagtttcaaaagatacgtgacaactaccatctagaggaaaggtgccccttagcagagaagcccagagcttactctggtcgtttncaganacaactgntggcttgcttgggatgcccccagcctttganaggcccttacccattgaccttttgccatcccttgggcattaacttnnggccttgggntttaancttgnttgccttnaanggncaggttttgcttaanccggntgnggc

SEQ ID NO: 369 - DNA, 443 bp, Homo sapiens
  misc_feature (1)...(443): n = A,T,C or G
gcagggcgggcngcggggtcttggcgaacggtcttcggaagcggcggcggcgcgatgaccacgctacgggcctttacctgcgacgacctgttccgcttcaacaacattaacttggatccacttacagaaacttatgggattcctttctacctacaatacctcgcccactggccagagtatttcattgttgcagaggcacctggtggagaattaatgggttatattatgggtaaagcagaaggctcagtagctagggaagaatggcacgggcaccgtcacggctctgtctgttgccccagaatttcgacgccttggtttggctgctaaacttatggaagttactagaggagatttcagaaagaaagggtggattttttgtggatctctttgtaagagtatctaaccaagttgcaagtaacatgtaccttnggtcgcgannacgc

SEQ ID NO: 370 - DNA, 636 bp, Homo sapiens
  misc_feature (1)...(636): n = A,T,C or G
acatttgtttatttaaagcacaggaaatgaataaaatgccacctaaaaagtatctgcaatgaataaattatttccagtgaagcactgcagatccacacacaccagtctgctaacctttaccaaggccatgtccggtgggcttgtgcttgttccagttgactcttccttgagacctttcccttctgtgcaatgaccacagcattagagaccagtcctgcatgcgctggccttcctcgtaggcatggcagaccacgtggatgagcagtgggctggcatgcagtaggcttnaacaaatggcacttcactgtttccagtgaccctgaaatgttttacgtaagtggggcctgggctttaaagaaaagagccagggttcctcaagctgggcccctttacttgaggccagcttcaggaaatactggncttaaggagccagcaacttgtccaggagttttgagcccttantttgaaggaaaatggccccttggngtccntgcaagcaccagnnatttccgtgatngtgancaagtnaccnnccttaagggaaggccaatcccnctttgggnggantcnagggcnctantcctgtttggaagggcttgaaggttgggaatntttaaaatggaggnntnggcttcc

SEQ ID NO: 371 - DNA, 615 bp, Homo sapiens
  misc_feature (1)...(615): n = A,T,C or G
ggtacaagcttttttttttttttttttttttttttttttctgttaaagaatgctttattaatacaaatacacacaaactctgaagcactaanaaatttaaatatctatgtcacagcaaacaggtggcaattcaacatccagggtcgacagaatgcttgaagganactgcaacagattggattcccatggtgganagggcatnttcacaggtgaaggggggcccagctgaaacagcttttcaagctctctctcctcgtcaaggatcatgagaggcactccactcaaggggaggtgcgcaatctggtgctcttcaggcaggtcaaaactctcaaagtctagaggattgaagggaaagaatttttctatttctggataggcatcatctgaggcaggaacagagctttttgctttaacagtcttctcagtcatcttttttggcaaaaaagcttggctggttttgtttganggggtccttgggctttacagacttttctgnaactctgttgaccagnttcccaaagccttttttagtaacttttaggtaaggcttntgggggcattaaacctttttccaaacctggggttgaaacttggaaccncctttaagggtttgnt

SEQ ID NO: 372 - DNA, 612 bp, Homo sapiens
  misc_feature (1)...(612): n = A,T,C or G
actttttttttgttctaggaatgagggtaggataaatctcagaggtctgtgtgatttactcaagttgaagacaacctccaggccattcctggtcaacgttttaagtagcatttccagcattcacacttgatactgcacatcangagttgtgtcacctttcctgggtgatttgggttttctccattcaaggagcttgtagctctgagctatgatgcttttattgggaggaaaggaggcagctgcagaattgatgtgagctatgtggggccgaangtctcagcccgcagctaagtctctacctaagaaaatgcctctgggcattcttttgaaagtatagtgtctgagctnatgctanaaagaatcaaaaagcnagtgtggatttttagactgnaattaaatgaggcnaaangatttctattcccagtgggaaagaanacctttctactgaagttgtggggggantatgttngaatgttagagagaacccttaaggnntnctttgattggcccttggagaccgnttggannacatnncccggaattnnantanaaattntttcnggnttnaagtttccccntgtngtngnannccaacctngtttttgccccccc

SEQ ID NO: 373 - DNA, 638 bp, Homo sapiens
  misc_feature (1)...(638): n = A,T,C or G
ggtactcagtatttcaaatcatgaacacaagattggaacttttggaaaaatgggttcaagctttcctattagccatggaaatgcaaagtttagcagaagcaagcaattaggcagagaacaaaaatgttaagcatggtgttgtctatcttattgaagtggttggaaatgaaagcttttaatttgatagatttatcagtataaaattagggaaaccacgtgtggggaatgaatcaatttagagcttcgggaattgtgaggtgacttttgtaacttttgttctgtgtgtgacctgtgaaccactagatgtgatctgcccttgtgggcaggtccagcatagttaggagttaggctttancataaaattctagctgcatctgagtctcctgggatgggtgctctttggctngttttggcctgccngattggtgagatccaganccagctttttcctgctgcttggcccctnncaattaatttgttgggattgccagtgcnagaanaccttagttgtaaagaattttaatcctaccncgaccnagttccaaaangcngggttttgaatgtgggaantttnnnaattttcccttanaaagtctaaattttgtccngttanactnttggttttaaagggaagggaa

SEQ ID NO: 374 - DNA, 503 bp, Homo sapiens
  misc_feature (1)...(503): n = A,T,C or G
ggtacagattaacttaacacaaaaacccgaacttcaaaatgaaggtgtgtggaggaaaggtgctgctgggtctccctacaactgttcatttctttgtgaggcagggggtagttcctgaatggctgtggtccaatgactaatgtaaaacaaaaacagaaacaaaaaaaacaaggaactgtcatttccacgaaagcacagcggcagtgattctagcaggcctcagggccctgggcctggggaggctacatgagggggagcctcagtcacaggatcaacctggggcccgaaggagcagggttccctgcctctccctctgcaacagatcatcccatccaacacaacccccaaaatgttgatgatgacgcaacatggtcaaccctcaagacctttaagacaaaacagagcagcataggaaaaaaaaaacaaaacgcaccaatttctgcatgtgtcaatggtagggcaccnttttaaaaaagtctgtctaaaacannctntgtttactt

SEQ ID NO: 375 - DNA, 611 bp, Homo sapiens
  misc_feature (1)...(611): n = A,T,C or G
ggtacaaaagctgttgaacttaatcccaaatatgtgaaagctctctttagacgtgcaaaagcccatgagaagctagacaataagaaggaatgtttagaagatgtcactgctgtgtgtatattagaagggttccaaaatcaacaaagcatgctgttagccgataaagttcttaaactccttggaaaagagaaagccaaagaaaaatataagaatcgtgaacctctgatgccatctccacagtttatcaaatcttacttcagttctttcacggatgatatcatttcccagcccatgcttaaaggagagaaatctgatgaagataaagacaaggaaggggaggctttagaagtgaaagaaaattctggatacttaaaggccaaacagttatggaagaagaaaactacgatanaatcataagtgaatgcccanaaaaaaaaatnatttaaaaaaaagcttgtccctgccggccggccgttcnaaagggcgaattcanctccctggngggcggtactannnggatccaacnttgggccaaccttggngnaaacannggntatantgtttcctgggnaaatggtntccngttncaatccccnaatnntngngccggg

SEQ ID NO: 376 - DNA, 601 bp, Homo sapiens
  misc_feature (1)...(601): n = A,T,C or G
cgaggtcttttctctctttctgtcttcatcccagatcaaagaatcccgagttaggatctggatgaaggataagcccctgaattgtcgatgggctcacccccacactgacccagcatctgaacttgcttaacagggagccggggctaaactgcttcaccctgcctgagaaccagggagcactgcatttctccacagggtggaggagaagaggcagaataaaccaagcctgggacacctccctcctgtctaggtgtacagcacacaggttaatactcttcaccctcatcctctccgtcagcactatctgctccaacctcctcataatccttctcaagggcagccatgtcctcacgggcctctgaaaactcgcctggaccacaaagtttgacctgatgtatgccaagccgtgcctttggtcactggnacctggccnggccggccgttcaanggcgaattccacacactggcnggccgtactantggatccnaactnggaccagcttgngtaatcatggcatnctggttcctggggnaaatggtatccgttacaattccnccanntcnanccggaacctaaagggtaaacctggggngctaatna

SEQ ID NO: 377 - DNA, 621 bp, Homo sapiens
  misc_feature (1)...(621): n = A,T,C or G
ggtacaagcttttttttttttttttttttttttttttttgtctgttcaagaaccagtctgggatcttgtacccagctctaattactggccgtagcagcatattgcttaanaattttgtagaacttatttctcatcagcagctgtccaaaggactgataaatagagacagatcccagtcctggatactttctgtaaatcctaatcggagactcacttntnagcaatggaggctgaaagtcttagtgagactcagtaaattccttnaggccttggcagatggatccagtaggttgagagaaagtgaaggacttcaggaacagaaagaaaatccccatgccactagcaactccatttttatnaactggaaggaacatgccaacgaccagcaacacatccagggtttatgaaaatgggggttcacagncnaaatgtcngntccaagttcaggctncnggattttggtttggaggactgaatggtgtggattaaaggcttncattttcttgnaaccttgaaagggtttttngganaanaattcnttgntaatgnaagctnggtttaaacttgacctngcccgggngggccnttcaaaagggcgnattnccgcncnttggggggccg

SEQ ID NO: 378 - DNA, 327 bp, Homo sapiens
  misc_feature (1)...(327): n = A,T,C or G
acatctccgacagtatctgtttcagcatctttgcncttctgaagtctttnatacttgtggcaaaagttcctgaaactggcctccangtgtccctccacctgtgctggcacttgggcgtttccacnaaacttcccaaacagctcacaatcctggctgactgggacaataattcagcaaactggctactcagacctggcaccaaatgtcctgtccaaaatgctgttcactgaaccagtgctgggcgcccctgggcagggtggctcgatcacccgccacatncacttggccgccagaagccngnggggaaggacctnggcgcgacnacgc

SEQ ID NO: 379 - DNA, 517 bp, Homo sapiens
  misc_feature (1)...(517): n = A,T,C or G
actcacaagtaagaaactttctctactgaaggatactgtcacagagtttgttgcagagcatctatatatatatttattnatttattttaaaaaantaaacaacantgatgaacgancccaggttcctagaaccaattctcttgattctctacttccacaaaataaagtgtatcatttggccaagactacagatgtgtttttnttttttcacanatgcaagtgccatgcaaaaataaattaaagaacagataccaaaacatacatgtgataaaactacanatggtagatttttaaaggcatttatataaacntaatttataaatacttctctttntgcctttatatacagtcncaaanctggntgttatacatntaggatttcctntgcntgaccttnggccgtnacnacgnntaagggccgaattctggaagattccatctacaattggcggctcgtttntancatncctttntanggcccaatttngnccnntannngagtcngattacaanntcn

SEQ ID NO: 380 - DNA, 351 bp, Homo sapiens
acgctgtggagggctgcagtgctcgtggattcaaaatcacagagggctggtaaatggcagcttctgtaggaataactgcagcaggagctggaaatgtgtaggagggaggagacaggcatggtaacttacatggcggtggggataagccatttcgatttaaagtgccccccattaacacaaagttcatctcctcagctgaacactgaaagacttcaacatatctgtccttcatgtttttttatgacacttctgtgcagccataaatgctctgtccgcagacttcatctggataaaggcatctcctgatgggcggccctggtgattcaaaaccatgtgaaccccatgagtacc

SEQ ID NO: 381 - DNA, 622 bp, Homo sapiens
  misc_feature (1)...(622): n = A,T,C or G
acacttccaattgtccatataattaagctttccacaatcttacacacccatcatctcctgaagatgctagcaccgttcctgttatattccaactcactcgccagacctgagaattatgattatcgaactgagccactatatggatttcaaactttgttggcccaccagaggaagtcagttctttcctcacaggctttaatgtaaaaattctcacatctttggtcgctattgctagaatatggaaagatcttcccaaatttggagcgaatgcaatatcatgaacaggatcagtgactgtcataagagtttcagcttttgcatatttcctggtgttttcattatattcaaaaatctgaaccttggccattgcgttggggctactgncatcactttctacggcgatcatgggggaatgagcacgagagctttgnaggggtnccaagaaatncacttccagcttagcttacttgaganctctggctggnaaagacccctnggctgagaattcntaaccatctggggccctcaaanantcttacctttccattngnggacaaggtggttacttagaaccccnggncttgggaccaacttnccnttcggtnncanagttttggtntcc

SEQ ID NO: 382 - DNA, 509 bp, Homo sapiens
  misc_feature (1)...(509): n = A,T,C or G
ggtactctcatcccgcccccattcaggctgatagtaacagcctaggtagagtcaacacataaaaaagtgtaattccaggggaggaggattagaataaggacacaaaggaagggaggaaaatgttctttgaggctgaaattccattaatttttcatagtattgagtttatatttgccattgcatccttcaatctttctaaaaaggaaatccccggaacataataaaatctcttctgtatagaaaagctacagctccacactaagaggaatgccgtctgccttaaagaatggaatcatcagtgaccaagaattacttccaaggagaaattcattgatattaaaaccaaagccagatccagctcagcaaaccgacagccagaacagtgatacggagcagtattttagagaatggtttccaaacccgccaacctgcacggtgttatttctgccacgtgtctctggaacacacattaaactgtggaaactnnctnctttccgctgggggtcccc

SEQ ID NO: 383 - DNA, 380 bp, Homo sapiens
acaattccacttatccatactattcctttataaaaggcagatttcaggtaagcttctaaatgcatgcgtaatgtagaggctaatattttctggcagtccttggttcctgaaatttgaacttcatatgtgttttaaacttttgtcaaaatagtcatgaaagatatgttatttttgcataatgaggtaatatatcaggggcgggcactcataagacagtataaatccacttgtctaaacttgcatgaggctgtgtgcattgtaaaatgccataaagagttttgggtcaagtgaatattttgctgaaggaataacacttacatttaactgagcacttttctgtaataaataccaaagtaggtttttgtagctgtaaactgtgt

SEQ ID NO: 384 - DNA, 317 bp, Homo sapiens
ggtcccagacccaagaccaaccgatggaggaggaggaggttgagacgttcgcctttcaggcagaaattgcccagttgatgtcattgatcatcaatactttctactcgaacaaagagatctttctgagagagctcatttcaaattcatcagatgcattggacaaaatccggtatgaaagcttgacagatcccagtaaattagactctgggaaagagctgtatattaaccttataccgaacaaacaagatcgaactctcactattgtggatactggaattggaaatgaccaaggctgacttggatcaataacccttggt

SEQ ID NO: 385 - DNA, 275 bp, Homo sapiens
acttttagtccctgttttacaggggttagaatagactgttaaggggcaactgagaaagaacagagaagtgacagctaggggttgagaggggccagaaaaacatgaatgcaggcagatttcgtgaaatctgccaccactttataaccagatggttcctttcacaaccctgggtcaaaaagagaataatttggcctataatgttaaaagaaagcaggaaggtgggtaaataaaaatcttggtgcctggaaaaaaaaaaaaaaaaaaaaaaagctgta

SEQ ID NO: 386 - DNA, 606 bp, Homo sapiens
  misc_feature (1)...(606): n = A,T,C or G
ggtacatggatattcccaaaccattccattagaaaactgccctccctgcacacacaacaaaaacagcgctatttcctacacctattggactgaaagtgcttggaaatggaatggttttagaatatgaagaagaacacaaaccaagtagctgtgggttgaacctggacgtgagctggctgcagggccgttgggtagaaaaccagcatctcataaacaggtcactacaaaaataggaagagtataaaaatagaatatattatgtcactatttcgtcttctctttatagtagcgtatcgtaggagtgggacaggtggcctttcccgaccctgctacgctggctggtgcccgacaaacctccactggatggtttgtcactggatggtttgttggggtggtggtcacaggcgcaaaggacatgcacacgggcacgctcgctactgnaacccagangtgacttcagcntgaataaaggngaaaaggtccccatntanctcnggaattattncctncccaggncctattaaggggctttntggcttttnaccanccaagncccnccccttgaaangccaaacttttttgaaaaaaaggganccttgnatngnc

SEQ ID NO: 387 - DNA, 339 bp, Homo sapiens
accacttgcagtcaaatgaattccttcgaaatgtatttgaacttggacccccagtgatgcttgatgctgcaacgcttaaaacgatgaagatttctcgtttcgaaaggcatttatataactctgcagccttcaaagctcgaaccaaagctagaagcaaatgtcgagataagagagcagatgttggagaattcttctagattttcagaacttgaagactattttctaatttctatttttttttctatttcaatgtatttaaactctagacacagtttttatcctggattaacttagataacttttgtagcagtggttatattgcttataatttaatgtacc

SEQ ID NO: 388 - DNA, 667 bp, Homo sapiens
  misc_feature (1)...(667): n = A,T,C or G
taccagttgtcatcatagccggagatggacacttcaggagggtagcgtacattcccatgacaccaatactacagttttcggagtcacagtaagatacacagaattacatccgtaattaatatgaatgccaacatgtcaagcagtaatttgttacatggcaaacaaaatcaagaaagcaaccatcaaacaaaagagacccatagcttcagacaaggcaaatcccaggatagcatatgagaacagctgctgcttcagcgaagggtttctggcataaccaatgataaggctgccaaagactgttccaataccagcaccagaaccagccactcctactgttgcagcacctgcaccaataaatttggcagcagtatcaatgtctctgctgattgcactggtctgaaactccctttggattagctgagacacaccattctgggccccattaaataccgtagagccctctccagtcctactagcctctggtcgagataacactgatgcagaaattggtctgtatgcaactctggatccagctcggatcagagagggggtgcaggcgagcttggcgcaggcgaacatcttacactcttcgggactgcgcggctggagatattgggtgacaggcgacgtgggctcctctcccgcttnctctctttccaggaagcgg

SEQ ID NO: 389 - DNA, 613 bp, Homo sapiens
  misc_feature (1)...(613): n = A,T,C or G
ggtaccagttgtcatcatagccggagatggacacttcaggagggtagcgtacattcccatgacaccaatactacagttttcggagtcacagtaagatacacagaattacatccgtaattaatatgaatgccaacatgtcaagcagtaatttgttacatggcaaacaaaatcaagaaagcaaccatcaaacaaaagagacccatagcttcagacaaggcaaatcccaggatagcatatgagaacagctgctgcttcagcgaagggtttctggcataaccaatgataaggctgccaaagactgttccaataccagcaccagaaccagccactcctactgttgcagcacctgcaccaataaatttggcagcagtatcaatgtctctgctgattgcactggtctgaaactccctttggattagctgagacacaccattctgggccccattaaaataccgnagagccttttcagtcctactagcctctggncgagataacactgatgcanaaatggnctgtatgccaactctggatccacttcggttcaaaaaggggtgcaggcaacttggcccangcgaacatntacacttttcgggactgcccgnttggnnaatgg

SEQ ID NO: 390 - DNA, 278 bp, Homo sapiens
  misc_feature (1)...(278): n = A,T,C or G
actagtcctctagaaataggttaaactgaagcaacttgatggaaggatctctccacagggcttgttttccaaagaaaagtattgnttggaggagcaaagttaaaagcctacctaagcatatcgtaaagctgttcaaaaataactcagacccagtcttgnggatggaaatgtagtgctcgagtcacattctgcttaaagttgtaacaaatacngatgagttaaaaananntcttttnttgaactctnangaaaancttggaccttngccgngaccacgc

SEQ ID NO: 391 - DNA, 604 bp, Homo sapiens
  misc_feature (1)...(604): n = A,T,C or G
ggtctttttttttttttttttttttttgaacacagatcactttattggcatggctttgttttaagaaaaggaaaagtgacaaagccaagagacagactntgctaacagatgcctgggggtggctggacatttttgcctcatgctgtgcaaagagggggatcctggcccacacatcctgctgattccttgggacaaggttgtctgcctgggcctcactgcaccttcttgaatacttgcttgcanaccacaccttccactctnatctncaggtgcagctcatcaccctngatccactgggtccagccacgccccttcttctcacccttctgacacactggagcttgctccgtcccagtcactgtgtcatgcacttgcggncatctatgcctgnagatcctcctaaactcctttccaacctggaagtccatgatgnantncctaaaagngctcaccgtggcggangatcatatggtcancggcntgaacgaantnttttggcgggnttcannaagttgcccatttttgcgcaagggcccattggncgtnnagggcccangtnctttgcngnncccctnagggngaatccccacnttggggccgtntn

SEQ ID NO: 392 - DNA, 610 bp, Homo sapiens
  misc_feature (1)...(610): n = A,T,C or G
acgaggggagcgagacgaaaggagaacggtgattattcatgacaggcctgatatcactcatcctagacatcctcgagaggcagggcccaatccttccagacccaccagctggaaaagtgaaggaagcatgtccactgacaaacgggaaacaagagttgaaaggccagaacgatctgggagagaagtatcagggcacagtgtgagaggcgctccccctgggaatcgtagcagcgcttcggggtacttattggcacaaattcgggcagcctccagggcttcagaggacagctgctcatattcatctgacaccatgtggccacaaagcggaaactcatccacttttgcctttttccgccccaggtcaaaaatgcgaatcttggcatcagggacacctcggcagaagcgagactttgggtgagcttgttttccatctagggatgatgggagacagtgacaaatcatccaccattagatttttataaggagcgcacaacccagacaacccaaatccctttggatgtgccagttcacaatagtggtcatgcctccattgagaatataatggctctngacttgccggaaggcaaacttaaggccataatgggaccng

SEQ ID NO: 393 - DNA, 314 bp, Homo sapiens
ggtcccagacccaagaccaaccgatggaggaggaggaggttgagacgttcgcctttcaggcagaaattgcccagttgatgtcattgatcatcaatactttctactcgaacaaagagatctttctgagagagctcatttcaaattcatcagatgcattggacaaaatccggtatgaaagcttgacagatcccagtaaattagactctgggaaagagctgtatattaaccttataccgaacaaacaagatcgaactctcactattgtggatactggaattggaatgaccaaggctgacttgatcaataaccttggt

SEQ ID NO: 394 - DNA, 498 bp, Homo sapiens
  misc_feature (1)...(498): n = A,T,C or G
accagacctgtcaacgtcnatttctcggnaaatttnttggtatttttgaatctncgtccagagaatgtaaaactccttcagncccagcttgccactcccgtccgaatctagcatgtcaaccataatttngaatcttcgtccagagaatgtagaactccttcagccccagcttgccactcccgtccgaatctagcatgtcaaccataattttgcatgnctcgatgctgaagccatctgactggatatcttggcgctttgctagaacccttctcaggatggtctgcngctcaaaggcanagatctccgnatcctctcctgccaactgggcaaacagnctcctgaatccatcatcaatgtcatcctcgctgatgtcgaactcttcaagattggcctcgatttcatcatcgacagcttggtagtcagctttcttttcagaaaagacccggatgcagaaatccccatccttgntgggttcgaaggtggaaggcacganaatgt

SEQ ID NO: 395 - DNA, 629 bp, Homo sapiens
  misc_feature (1)...(629): n = A,T,C or G
gccgcccgtcaagctgtccacatccctggcctcagcccgccacatcaccctgacctgcttacgcccagattttcttcaatcacatctgaataaatcacttgaagaaagcttatagcttcattgcaccatgtgtggcatttgggcgctgtttggcagtgatgattgcctttctgctcagtgtctgagtgctatgaagattgcacacagaggtccagatgcattccgttttgagaatgtcaatggatacaccaactgctgctttggatttcaccggttggcggtagttgacccgctgtttggaatgcagccaattcgagtgaagaaatatccgtatttgtggctctgttacaatggtgaaatctacaaccataagaagatgcaacagcattttgaatttgaataccagaccaaagtggatggtgagataatccttcatctttatgaccaanggaggaattgagccaaccatttgnatggttggatgggtgtggttgcaattnggtttactggggaaactggccattangaaaagggntcctgggtaaaagaatccctatgggggccnnaacctttgnttnaaagccntngccccaaaaangggntttttgggcggnatgtttcnaaaaacn

SEQ ID NO: 396 - DNA, 614 bp, Homo sapiens
  misc_feature (1)...(614): n = A,T,C or G
ggtacttgggcttctttcagctgcttcaacagagtggcagcaaccaagctggagtccaagccccctgataaaaggcagccaatccttctgtctgtcatcaaacgtttctttacagcattattaaaaaggatcctgaggttgttcttcacagtttctatctcaaaacctggaaagagtttctccacattgtcatagagggcgtgcaggggttcatcccgacagtgatgatatttaaccatttccacggatgcaactttgccatttggctttaaatccaaaacttcatagtgtccaggaagaaaaggctccacttttaaaaagggagtcgcggagtgcttcaatgtaacaagacctttaacttctgaacatacagccaaaaatcatctttctgncattgctttaaaccaangtctgactccatatggtatctcttacccaggaacccntttcttaatgggcaggtantccagttaaaaccaaatggcaaaccccanccantccaaccnttccnaaatggnttgggttnaaatnccttcctttgggcataaaagaattnaangggnttnnttttancctttccccttttgggcccggggatttcnaaaattcnaaaa

SEQ ID NO: 397 - DNA, 588 bp, Homo sapiens
  misc_feature (1)...(588): n = A,T,C or G
acctgggcataggaaggaaccaggacagggctggggacagaaggtggtcacagtcatggtttcactctcagaaatatcctgggcctatggcttaaggcttcgtggagcagggagtggaccttgtggttatttacaaggctgggccatataaaagcattgcaaacatggagtggagaggatccttggagatgagctggttcaatcactcctctgaccaacaaggaaacaaaggcccagagaggagaaggcagtgcctggccagacgtgggacctgaacccagccagggctctgactcccagtcccccagtcccctctctacctccttgcttggctgagtctttttttgataaaggccccagacagcctctccgacagtctcaggtcaggctggggttataaatggagcagtggactcagagtcagaggcccagactctgntcttgggccttnacattaccaagncttgctaataaccacgaggccctggtgtggaggggctgctctcttttaagctcagctcntatctggaacaggccacaaagttncatgggataanggntgaggccnnagcccacagngtggaggnc

SEQ ID NO: 398 - DNA, 348 bp, Homo sapiens
ggtactagccggacttggattttctggaaagatttcagttgaggaacgggaacaaagattatgatagctttccgaccaccaccaacttcaatttccttagctgccgtaatattcagctccctgagctgagccttgaggtccgagttcatctccagctccagaagagcttgggagatgccggactcgaactcgtccggcttctcgccattgggcttcacgatcttggcgctcgaactgaacatggctttctcctgggagaacttgccgagcgccggcttaggaagagacccaaatctcgcgagagcacgtcaaaatccggcgtccgaaggcaagaggcggaaacagcgc

SEQ ID NO: 399 - DNA, 630 bp, Homo sapiens
  misc_feature (1)...(630): n = A,T,C or G
acatccaagtttaaaattatcagcgaaatggtccatgtttttccaattacctgctgacacggttctaagctaagtgaaggggaagatctgagagcgtgctgtttgtggctgttgatgcatattcgtgatgtaacaggtcctggggcctcactttaccccatttgtaaaatggggctaatgtcacctgcctcttacctacctcagagggatttggtgaagcaaactgttaatcttcgaaaacgaccatttcacttcttggatatcaagtgctaacccagtatgttcttcttttttatgtaagggacagctttctccacagagtcctttctgctggtgaggacagcatttctgagcagggctttgttctctatgtgcattaggacttttatcatgcccttggtctatgtgtagttacttgacagcatcaaatgccggctcttcctaatgnccttcaaggtttcatgaactaacaaccccacctttcancatgggtctggcccctgaatttgctgngacttccagaccacactggttctaccacctgaacaggccnttaaagttcccaanggtcancttccttaattccttggttcccggtgtatggggaacttggcctanaaaagggccncc

SEQ ID NO: 400 - DNA, 619 bp, Homo sapiens
  misc_feature (1)...(619): n = A,T,C or G
actgaacaggtaagtcatccctcagccagagattagtctacttcttccatgcgtgatgtgtcgtcatctccttcaaggggtggcatttcttcagttacagcagcactggtatcatcagcagtagggtcatcttcatcaatacccagaccaagtttgatcatcctgtagatcctgttagcatgtgtctggggatcttccagactgaagccagaagacaggagcgcagtttcataaagcaagatgaccagatccttcacagacttgtcgttcttatcagcctctgccttttgccttaaggtctcaataatggaatggtcagggtttatctccaggtgtttctttgctgccatgtaacccattgntgagttgctcttagggcttgagctttcatgattcgctccatgnttgctgccagccatatgtgcttgtgacaatacagnatggagatgcaccaatcggttggacaaaccacctttcactttttcttccatangctttcagatttgcaaagttctaaactttgggttttcccttctgntcttttccttttatctttggaagtccaggcttnttggggacgncctaagcttccctnaatctttagtgtggannagncntn

SEQ ID NO: 401 - DNA, 663 bp, Homo sapiens
  misc_feature (1)...(663): n = A,T,C or G
cgaggtacttgggcttctttcagctgcttcaacagagtggcagcaaccaagctggagtccaagccccctgataaaaggcagccaatccttctgtctgtcatcaaacgtttctttacagcattattaaaaaggatcctgaggttgttcttcacagtttctatctcaaaacctggaaagagtttctccacattgtcatagagggcgtgcaggggttcatcccgacagtgatgatatttaaccatttccacggatgcaactttgccatttggctttaaatccaaaacttcatagtgtccaggaagaaaaggctccacttttaaaaagggagtcgcggagtgcttcaatgtaacaagacctttagcttctgaacatacagccaaaaatccatcttctgcattgctttaaacaaaggtctgactccatatgtatctctacccaggaacactttcttaatggcagtattcagtaaaaccaatgccaacccaccattccacataccaaatgggttgctcaaatcctccttggcataaagatgaaaggttatttnaccatncactttggccgggattcaaattccaaaagccggtgcatttttntaanggtgganaattnncccttgnaccnaanccccaaatccgggattttnttncctcnaatngntgg

SEQ ID NO: 402 - DNA, 673 bp, Homo sapiens
  misc_feature (1)...(673): n = A,T,C or G
ggtacgtgtccagctctgaagggcaaagtgcagaagatcctaatctggaagtggggtcagccaccatctcccacaccagtgcctcggcctccagatgctgatcccaacacgccctccccaaagcccttggaggggcggccagagcggcagttctttgtgaaatggcaaggcatgtcttactggcactgctcctgggtttctgaactgcagctggagctgcactgtcaggtgatgttccgaaactatcagcggaagaatgatatggatgagccaccttctggggactttggtggtgatgaagagaaaagccgaaagcgaaagaacaaggaccctaaatttgcagagatggaggaacgcttctatcgctatgggataaaacccgagtggatgatgatcaccgaatcctnaaccacagtgtggaccagaagggccacgttccactacttggatccaagtggcnggacttacccttacgaatcanggcntttttggaanaatgaaggttttngaaaatccaggaataccnacctggtcaagcnganctttttggnaatcccnngggagttnattgaaggggtaaaggaaggcnnnacccagccaagaaagctttaagaaaggggnaactttcggaaattggaaaaggccttcanaacnccaacggttgttccacngg

SEQ ID NO: 403 - DNA, 616 bp, Homo sapiens
  misc_feature (1)...(616): n = A,T,C or G
ggtaccgattatatcatctcagtcttgaatttactcacgctgattgttgaacagataaatacgaaactgccatcatcatttgtagaaaaactgtttataccatcatctaaactactattcttgcgttatcataaagaaaaagaggttgttgctgtagcccatgctgtttatcaagcaatgctcagcttgaagaatattcctgttttggagactgcctataagttaatattgggagaaatgacttgtgccctaaacaacctcctgcacagtctgcaacttcctgaggcctgttctgaaataaaacatgaggcttttaagaatcatgtgttcaatgtagacaatgcaaaatttgtagttaaatttgacctcagtgccctgactacaattggaaatgccaaaaactcgagtctttaattgtaatggctttggtttatccacagttaggccctttctcaatacatatttatgnatttcactgggcatggcaacatggctggaaaaatcactggatgtaaccaaacaggccttttttaanaaatgncncggnttaaccaaanaaaaaaaaaaaaaanaaagntttgaccttcccgggngggcctttaaaaggnnaattccn

SEQ ID NO: 404 - DNA, 613 bp, Homo sapiens
  misc_feature (1)...(613): n = A,T,C or G
cagtgctgggcctaaaggagataacatttatgaatggagatcaactatacttggtccaccgggttctgtatatgaaggtggtgtgttttttctggatatcacattttcatcagattatccatttaagccaccaaaggttactttccgcaccagaatctatcactgcaacatcaacagtcagggagtcatctgtctggacatccttaaagacaactggagtcccgctttgactatttcaaaggttttgctgtctatttgttcccttttgacagactgcaaccctgcggatcctctggttggaagcatagccactcagtatttgaccaacagagcagaacacgacaggatagccagacagtggaccaagagatacgcaacataattcacataatttgtatgcagtgtgaangagcagaaggcatcttctcactgggctgcaaatcnttatagcctttacaatccggactttggggaaatggtatacctggatctactctgnntttanacctttgggacntnggaaanntccccaaaangggaaaggctttcaaangtaaactttgaacctgaaaataagtttgttnaaacncctattgcaagtttgtttttngga

SEQ ID NO: 405 - DNA, 605 bp, Homo sapiens
  misc_feature (1)...(605): n = A,T,C or G
ggtactgaggtgtaaagggatttatatggggacgtaggccgatttccgggtgttgtaggtttctctttttcaggcttatactcatgaatcttgtctgaagcttttgagggcagactgccaagtcctggagaaatagtagatggcaagtttgtgggttttttttttttacacgaatttgaggaaaaccaaatgaatttgatagccaaattgagacaatttcagcaaatctgtaagcagtttgtatgtttagttggggtaatgaagtatttcagttttgtgaatagatgacctgtttttacttcctcaccctgaattcgttttgtaaatgtagagtttggatgtgtaactgaggcgggggggagttttcagtatttttttttgtgggggtgggggcaaaatatgttttcagttctttttcccttaaggtctgctagaatcctaaaggcaaatgactcaaggtgtaaccagaaaaccagaaaatcccattttcnggatatnngacccccccaggttancggttattnaactttnaccnntttacctttaggctttgggaaaaaatttnccttggaaaaagggttgggannaccttttttncccccccc

SEQ ID NO: 406 - DNA, 255 bp, Homo sapiens
ggtactacctgcggcctgtctcccagcaggagtttgacaagaacaccttggatctcaggcaacagaacggaactgcctcatcacggaagaccctctggaatcaagaactctacatccagcaggacaactcagagaggaagcggaaacaccttccagaccgacaggatgggcctgcagccaagagtgagaaagcagcccccagaagtcagcactggttgcacagggacctgcgtgtgcggtttgtggacaacatgt

SEQ ID NO: 407 - DNA, 601 bp, Homo sapiens
  misc_feature (1)...(601): n = A,T,C or G
ggttttttttttaagaggaaaacccggtaatgatgtcggggttgagggataggaggagaatgggggataggtgtatgaacatgagggtgttttctcgtgtgaatgagggttttatgttgttaatgtggtgggtgagtgagcccnattgtgttgtggtaaatatgtagagggagtatagggctgtgactagtatgttgagtcctgtaagtangagagtgatatttgatcaggagaacgtggttactagcacagagagttctnccagtaggttaatagtggggggtaaggcgaggttagcgaggcttgctagaagtcntcataaagctattagtggnaagtagagtttgaagccttgaaaagaggatatgatnccactntgagtgcgttcggtgtttgagttngctaggcagaatattantnatgatgtaagcccgtggccattatgagantgactgccntgttaagnttnanggggtttggatgangaatggctngtaactactaaggcctatgntggctggttnaanagnttcnatntncnnantttanntcttgcttgtctatgcagaatnganctgntattnatatgcctcacnanggg

SEQ ID NO: 408 - DNA, 630 bp, Homo sapiens
  misc_feature (1)...(630): n = A,T,C or G
ggtacaaaaggagtctcaggcttgaagaggttatgtaacttgcctaaggtcacacagttaagtggcagaaatgagatacaaaccaaagtctgtctaactccagagttcacaccatcatgttatagtgccatcttcgtacattgagctccatagagacagcgccggggcaagtgagagccggacgggcactgggcgactctgtgcctcgctgaggaaaaataactaaacatgggcaaaggagatcctaagaagccgagaggcaaaaatgtcatcatatgcattttttgtgcaaacttgtcgggaggagcataagaagaagcacccagatgcttnagtcaacttctnagagtttctaagaaagtgctcantagaggtggaaagaccatgtttgcttaaagaganaggaaaatttnaagatattggcaaagcggacaaaggnccgttttgaaagangaaatganaacctatatcccttccaaagggggagacccaaanagaagtttcaaggatnccaatggcaccccaagaaggcntncttnggccttcttnctcttctgctcntgagtattcggcccaaaattcaaagggagaacatcttnggcctggccattggtgatgttggcaaaaaag

SEQ ID NO: 409 - DNA, 614 bp, Homo sapiens
  misc_feature (1)...(614): n = A,T,C or G
cgaggtaccgggatgcagcagtgatggcttttggttgtatcttggaaggaccagagcccagtcagctcaaaccactagttatacaggctatgcccaccctaatagaattaatgaaagaccccagtgtagttgttcgagatacagctgcatggactgtaggcagaatttgtgagctgcttcctgaagctgccatcaatgatgtctacttggctcccctgctacagtgtctgattgagggtctcagtgctgaacccagagtggcttcaaatgtgtgctgggctttctccagtctggctgaagctgcttatgaagctgcagacgttgctgatgatcaggaagaaccagctacttactgcttatcttcttcatttgaactcataagttcagaagctcctagagactacagacagacctgatggacaccagaacaacctgaggagttctgcatatgaatctctgatggaaattgtgaaaaacagtgnccaaggattggtaatcctgctgnnccagaaaaacgacttttggncatcatgggaacgactggcacanggtcttcaanatggagtcncatatccgagcccattccattggaatnccgttcaangacttnntct

SEQ ID NO: 410 - DNA, 611 bp, Homo sapiens
  misc_feature (1)...(611): n = A,T,C or G
cgaggtacccatgttatgctttcacctctcaccccaatggagtcacacaggcctgagtttgaacagttaacacagcttggaagggacacatgcctgattcccatccttggagaacaatatcatgctatgaggagtaggaagggcaagagatatgaaaagaacagaggaaatgtggttcctagaagtcagaaggcatcaagggtccatcagtgtagaagtggctggggcgggagacgtaaacctcatccacggtgttctggccagccaacagtgggtcaccattcggcatgatttcttcaatctttacacagtttctgaagatttccattggctcagtgttcaaatgtctcagatcacagggcaaatctggctctggcactggctgtgatacaggtccttggtctggctctggcactgnttgtgatacccatgcatagtgtgggctctatcacangctccagagtggacttcagcacagactctagcttttggccccagaatccagccttgnctttaaccagtggctnttaatncaggctgacctctggctntggcaccagncctagttcagcttntaangctccanttttgctntggtttaagctccacng

SEQ ID NO: 411 - DNA, 590 bp, Homo sapiens
  misc_feature (1)...(590): n = A,T,C or G
ggtacccttgtctttaaaaggattcccccttataaggactcttcaagtaaatccacacatatatagtcaactaatttttgacaaagacaccaagaatacacaatggggaaaggatagtgtcttcaataaacagtattggaaatactggatatccacatgcaaaagaatgaaattggatgaaatatggtgaaattattttacaccgtaccggctccccaacgtgcacggcaggagctacggcccagcgccgggcgctggccacgtgcagaaatggagtttcatcatgttgtcctctcgaactcctgacctcaagtgatccacccgcctcgcccttccaaagtgctgagattacaggaagagtctaacctgtctctgcaagctcttgagtcccgccaagatgatattttaaaacgtctgtatgagttgaaagctgcagttgatggcctctccaagatgattcaaacccagatgcagacttggatgtaaccaacataatccaagcggatgagcccacgactttaaccaccaatgcgctggactttgaattcagtgcttgggaaggatacgggcgctnaaagacatcggaacan

SEQ ID NO: 412 - DNA, 609 bp, Homo sapiens
  misc_feature (1)...(609): n = A,T,C or G
ggtacagaagatgctgtggactattcagacatcaatgaggtggcagaagatgaaagccgaagataccagcagacgatggggagcttgcagcccctttgccactcagattatgatgaagatgactatgatgctgattgtgaagacattgattgcaagttgatgcctcctccacctccacccccgggaccaatgaagaaggataaggaccaggattctattactggtgtgtctgaaaatggagaaggcatcatcttgccctccatcattgccccttcctctttggcctcagagaaagtggacttcagtagttcctctgactcagaatctgagatgggacctcaggaagcaacacaggcagaatctgaagatggaaagctgacccttccattggctgggattatgcagcatgatgccaccaagctgttgccaagtgtcacagaactttttncagaattttcgacctggaaaggtgttaccgtttttctacgtctttttggaccagggaagaatgtnccatctggtttggcggantgctcgaanaaagaggaagaagaagcnccgggagctgatccaggaagaacnnatcccggaagtggagtngctcantna

SEQ ID NO: 413 - DNA, 420 bp, Homo sapiens
ggtaccgccacatcgctgacttggctggcaactctgaagtcatcctgccagtcccggcgttcaatgtcatcaatggcggttctcatgctggcaacaagctggccatgcaggagttcatgatcctcccagtcggtgcagcaaacttcagggaagccatgcgcattggagcagaggtttaccacaacctgaagaatgtcatcaaggagaaatatgggaaagatgccaccaatgtgggggatgaaggcgggtttgctcccaacatcctggagaataaagaaggcctggagctgctgaagactgctattgggaaagctggctacactgataaggtggtcatcggcatggacgtagcggcctccgagttcttcaggtctgggaagtatgacctggacttcaagtctcccgatgaccccagcaggt

SEQ ID NO: 414 - DNA, 621 bp, Homo sapiens
  misc_feature (1)...(621): n = A,T,C or G
acatagttttatagtagccacagtaacttccagtgactggcaaatttctttgcatcagctggcatgtgtggtgaatggaattcccatgaacagctcttacatccttccgctttccttctacaggcctcggtcttgtttccaaaggtgactgcagtgaggatgtaaggtccatgacctctagggataatgccatccactcaggaagaaagatgctgagaaactctagggatatctaagtttacatcacagggggagaatcaattgtggaggttttaagaagacatttgaatttttgcccctaatcaagaagtgttttgccatctggtttacattcaataactagttggctcatcatttgcagaaataaactttcctctagattaggaaacttcatcatgagatctgagatatactggtttggaaaggttnctcagttctcttggctttcnaagtccccggccttggaatggggtnaaggcccattggangcncattnaattggccttggggtaaaggaaactttggantggcgnccaaattnnaacccgggtgggccattnnttttnacncggtaaattaaggntgggccccggaaaatttggttttccggaananntttng

SEQ ID NO: 415 - DNA, 619 bp, Homo sapiens
  misc_feature (1)...(619): n = A,T,C or G
acaagcttttttttttnttttttttttttttttttttaaagatcaacaaacattttattaattctgattccttttatcatgtgcttttttatacaaagcactttnaaatncattacattatcttaaatatataataggagtttctttcggattcagtttaaaaatgacaaatagcattcgttgcgcccaagttagaattacaccaaaattaccatgngctggcacataccatcatcccactggtggctggaaaactgggttgcaggagtgtctgcactgagatgggccaccaccccagtggccatataggtatagatgagggaaggatggactanaancaagctgggctttcngggtcgtctatantcctttttcacttcattccgttttccccattgngcnttgaacccagggaatctnnttgacccatccttggagctnttaaaaaggacctgngttnaaggtgccnccntttgaaaaggggccccctttgnatnaantgggccgttgaaaaaggccctttngatttggancccaangacngggaaatttcacttnggcattaacnantgtcnccgaaatnttcnctnngntatgaactttantaanatngnttngn

SEQ ID NO: 416 - DNA, 611 bp, Homo sapiens
  misc_feature (1)...(611): n = A,T,C or G
ggtacactaaggtatgagctgaagctttaggttctccgtgcttccctcaagacctccttcttgctaacagaagcagtaggcaattgctgcagtgcgtttctcaccctgccaataggtctgtctgtatctctgttaaggaaaatagcctggtccctcctggcagtgcttggaagcttgatgctaatttttatatagcgtggcaagctgaccagcagtgccaggccttgatctgtattctgcactatccctttacttggttcctggcactgaatggtctccagccctgaagaatcacgtgtgatcacagcagctgacctgggctttctccccgagaggaaggggcatgtcatttttatttgacagagggaaaatgggaactgccttgactgcctttgntgngctttcccgcgtaagaaagcactgngtttaaactgtgcaatacactngctttgccatngatgtaaatgtaagaaaatccctanctttaaaacctantggtttgaacnttattatatnaaanactttttaacctattnngnaatttngggnccttgccggtaagntttngggggggnaaacnngttncaaaaggaaaggtcctttaactttng

SEQ ID NO: 417 - DNA, 609 bp, Homo sapiens
  misc_feature (1)...(609): n = A,T,C or G
caggtactgagacatcacattactggccagtgttggcaaagaaactgccacaaacaccatgagaaggcaggcaattttatactcttcttctggactaatgttttccgatttttgtgaagaaagagctacgaccaatgcaggatcaatctcacaaggtaatccggcagctgatgataactcatacacattcattgcaaccttcatatcagtttcccttggaatgtgatccttaaaatcttcaattgaacttacaagaaaaggaatgtggtaggataacacatctctaagtgcttcttgtgccaatgatcggaaggataaaattacaccaattattgtcatcctcttcaagacactgtcaacagatgataatcttttaaacagtgcagccatctggtctggtttgtcaaagctggtcctcatttgtgttaacacatcaacattctccaccacaagtttcttaagttcaagcaaccttgtgatgaaatatgccacataaggctttcacttagaaacntcataccatatgggcctaataagtctggataatgacctcattctganatggtcagaatattcntntgcattggaangtaaatcaatttctggagg

SEQ ID NO: 418 - DNA, 643 bp, Homo sapiens
  misc_feature (1)...(643): n = A,T,C or G
ggtactcccgattgaagcccccattcgtataataattacatcacaagacgtcttgcactcatgagctgtccccacattaggcttaaaaacagatgcaattcccggacgtctaaaccaaaccactttcaccgctacacgaccgggggtatactacggtcaatgctctgaaatctgnggagcaaaccacagtttcatgcccatcgtcctagaattaattcccctaaaaatctttgaaatagggcccgtatttaccctatagcacccnctctaccccctctagagcccactgtaaagctaacttaggcattaaccttttaagttaaagattaagagaaccaacacctctttacagngaaatgccncaactatatactacccgtatggcccaccatanttacctccnatactncctacactatttncttatnaacncancttnanaatattaatctcataattaccagctanctttncttaaccaatgnccnattanaaattaaanntattatntaccatactccntgtnntcnnnataatgtanngnananattggnntcggcttcaatttatnnggtcccaaaaatgcctangcttaactcngnactngtncgggcggcncgttngnaaaggggctgaaattcng

SEQ ID NO: 419 - DNA, 607 bp, Homo sapiens
  misc_feature (1)...(607): n = A,T,C or G
accagaatatggacacattccaagctttcttgtcgatgcttgcacatctttagaagaccatattcataccgaagggctttttcggaaatcaggatctgtgattcgcctaaaagcactaaagaataaagtggatcatggtgaaggttgcctatcttctgcacctccttgtgatattgcgggacttcttaagcagttttttagggaactgccagagcccattctcccagctgatttgcatgaagcacttttgaaagctcaacagttaggcacagaggaaaagaataaagctacactgttgctctcctgtcttctggctgaccacacagttcatgtattaagatcttctttaactttctcaggaatgtttctcttagatccagtgagaataagatggacagcagcaatcttgcagtaatatttgcaccgaatcttctttagaacaagtgaaggccntgaaaagatgcttntacccccggaaaagaagcttccaatacnggnttgaanaagnaccttgggcgggaacacncttanggnggaaattcngnccacttggnggccgtactaangggnnccaacttnggnccaactttggggaaacanggcanaa

SEQ ID NO: 420 - DNA, 494 bp, Homo sapiens
ggtacatgagaacatatatttattgcatgattttctagatacacagtctatgcattattcatatacatttattttagcctaaagtggttttcaaatccagttcttcaagccataaatgaccaagatccaagcaatctgaatttgtttttgtgattatttgactggaatgcttcttaagtggaataactatactccgttatccacccgatttcctaatgtaattgaaagattttctattttgccacacacttggagacaataagggtttttagttttatctactcttctattgaagttaaagaaagaaaaaaagatttttttatttgtattaatgaaaagctttagtttaaaataaggagatccagaataaaaagaagagactgatctcttcaattattgtcatctgtagccaccagcacatcactcttatgtaatccccaaaggcttggcatgccgtaagtgtgtggtggggtagactgctgccggggaatcgt

SEQ ID NO: 421 - DNA, 366 bp, Homo sapiens
ggtaccaaggttattgatcaagtcagccttggtcattccaattccagtatccacaatagtgagagttcgatcttgtttgttcggtataaggttaatatgcagctctttcccagagtctaatttactgggatctgtcaagctttcataccggattttgtccaatgcatctgatgaatttgaaatgagctctctcagaaagatctctttgttcgagtagaaagtattgatgatcaatgacatcaactgggcaatttctgcctgaaaggcgaacgtctcaacctcctcctcctccatcggttggtcttgggtctgggtttcctcaggcatcttggctaagtgaccgcacaggaccaacggcacagccac

SEQ ID NO: 422 - DNA, 418 bp, Homo sapiens
  misc_feature (1)...(418): n = A,T,C or G
ggtacaagagtgtttcatgaaatccgtttttaaaatgaacatctctgtgtgccacagttcctaggactggggcaaggacacagtgtcaagtcttgttttgaggatgagtctctgaagagacagaattcctgccagaatgcgcacagaacataagtcagccaagtgtgtcgtgccagggatactttgactttggtttgctgctgctgctagggatattgggagggttatcctttccaggttgtaggagagggttgtgggtaaaggtctgtcgtaaaggacccctggctgctagctccaactgattccgcatgcgttgttcacgctctcncagctgacgccgtcatttcagcatttttccagccttttttgaaagctctctaggaagcctttccgtggaggtaatttgtccaggtcatgt

SEQ ID NO: 423 - DNA, 374 bp, Homo sapiens
ggtctattctgcatatagagaactgagggctttccctgagaaacagttgagttgtgttgccaaccagaatggctcgcaagctgactgtgagctcggaaatccttttaaaagaaattcaaatgtcactttttatttggttttaagtacacctgattttcatgacaaatacggtaatgctgtattagctagtggagccactttctgtattgttacatggacatatgtagcaacacaagtcggaatagaatggaacctgtcccctgttggcagagttaccccaaaggaatggaggaatcaagtaatcatcccaactggtgtaataatgaattgtttaaaaaacagctcataattgatgccaaattaaagcactgtgt

SEQ ID NO: 424 - DNA, 610 bp, Homo sapiens
  misc_feature (1)...(610): n = A,T,C or G
ggcggagcttgaggaaaccgcagataagtttttttctctttgaaagatagagattaatacaactacttaaaaaatatagtcaataggttactaagatattgcttagcgttaagtttttaacgtaattttaatagcttaagattttaagagaaaatatgaagacttagaagagtagcatgaggaaggaaaagataaaaggtttctaaaacatgacggaggttgagatgaagcttcttcatggagtaaaaaatgtatttaaaagaaaattgagagaaaggactacagagccccgaattaataccaatagaagggcaatgcttttagattaaaatgaaggtgacttaaacagcttaaagtttagtttaaaagttgtaggtgattaaaataatttgaaggcgatcttttaaaaagagattaaacccgaagggtgattaaaagaccttgaaatccatgaccgcagggagaattgcgtcatttaaagcctagttaacgcatttcctaaaccccagaccaaaaatggggaaggattaattgggagtggtaggatgaaccaanttgggngaagatgaagttggaagtggaaactggaaaaccgaaagtncctcggccc

SEQ ID NO: 425 - DNA, 368 bp, Homo sapiens
ggtataagttcagagagaaagattccttcccaaggtcatgcagctagtaaatgatagaatcaggattcatagcatcactatagggggtcaatatttacacaaaaaaggaaagtcacaagcctgtttaaaatgaagtgaccaccttttcttgcatagactaaataactcgaactggcatttttaggttggaaagacagctgaattagtagttaagtctgatagccaagtaagttttaaaaaccaaagcatccaggatgcacacccctgcaccatttgctgtgcgaattaatagttctgtctctctctctctttcttttttctttttattctttgagatggattttcgctcttgtcgcccaggctggagt

SEQ ID NO: 426 - DNA, 630 bp, Homo sapiens
  misc_feature (1)...(630): n = A,T,C or G
actaccacagcctttaagtgacattgatttataacttggtcacaattcactgcatttaggaaaaccagcattcttatctggtcagtgctcgcttcttagcaacccctaattaaatttaattcatctctaaatcttagcttcaactttattcaattacatttggctgacggctgttttctaaaacccttaagtgttgaccataaatgcaaaacttccagtatctgttgggttttattagcagatgctgcttttatttaaaaaaaaccgacagtataactgtcataattatggaaggcactgcttccgataattatattctattaaaaaaacaccatttatagtgaactctgtcactgataaataaacaataaatatctcagtgccaaaaggacagaaagctctcccctaagattaacactttggccaaaatttggtagcatattattctttaaagtctgacaaactgagtctgcaactaaacacctgaaactggtctctttcaatgggctttggaagaaccaaaataccaagaactaaatggaggcttatgggggaagggncgaggaaataaatatctaagcnttggcttctggccctctttcataaanncctgaggtacatattangctn

SEQ ID NO: 427 - DNA, 224 bp, Homo sapiens
ggtgggagggtggtgtccactgcccagttccgtgtcccgatgcccagcgccagcgccagccgcaagagtcaggagaagccgcgggagatcatggacgcggcggaagattatgctaaagagagatatggaatatcttcaatgatacaatcacaagaaaaaccagatcgagttttggttcgggttagagacttgacaatacaaaaagctgatgaagttgtttgggt

SEQ ID NO: 428 - DNA, 543 bp, Homo sapiens
  misc_feature (1)...(543): n = A,T,C or G
ggacgctctcagctctcggcgcacggcccagcttccttcaaaatgtctactgttcacgaaatcctgtgcaagctcagcttggagggtgatcactctacacccccaagtgcatatgggtctgtcaaagcctatactaactttgatgctgagcgggatgctttgaacattgaaacagccatcaagaccaaaggtgtggatgaggtcaccattgtcaacattttgaccaaccgcagcaatgcacagagacaggatattgccttcgcctaccagagaaggaccaaaaaggaacttgcatcagcactgaagtcagccttatctggccacctggagacggtgattttgggcctattgaagacacctgctcaagtatgacgcttctgagctaaaagcttccatgaaggggctggggaaccgacgaggactctctcattgagancatctgnttcagaacccaacccaggaagctgcanggaaantaaccagagtctaccaagggaaatgtaccctnnggnccgngaaccacgcttaangggcgaaattcca

SEQ ID NO: 429 - DNA, 346 bp, Homo sapiens
actatcttttcattcagtcccttaagcagcttactcttcaatgccaacaaaactttattttttaaatagtcttaaaagtgcttaagggagttctggttcctctttttagcctgcacagtttaagatcaatggtaaaggtaggaaataatcataagggcactggaagaaggaatgagtctaaataatgtataatgactgttccgccataccaattttgtcatggtgattattcactaattttataggagagtgtattgagatctgctacagcttcttggatctttgaagcactgctgaattacatacacaaagcagagcagatgtcagcacctgattaatcagtacc

SEQ ID NO: 430 - DNA, 605 bp, Homo sapiens
  misc_feature (1)...(605): n = A,T,C or G
ggtggcgcggccgaggtacagctggtgcttctgccttaccccatcctctcctctcagattcaccgaggactgttcaggtggtaacattctcttagggtagggaactctgcagagggagagctgaggaggttccggccatagttgtttgtaatcttagggctctgggcttggctgaaacatgacggtattgcttggtttcaggcttgacactgccaggcgcctattgcttgacctctgtttaaatgagggacttcaagactagacagcatggctcttttcagtttattgcatgaaggagttacactagtccaagttaaaagcggaccccaaatggttacattatacaagctgtgaggtttttaaacctgtgacaagggagagaagggaaattctactcattgcaaggaaatcctcacttaagcttcagtgagccacaagcacttaaaacccatgaaccttcagctgatcgtccttagccagtccaatctctacgaggaactggcatatgtcttgcgttggcaccctgtagctgaattacttctcatattcngatgctaattncagacctgnccggcggccgtcaaaggcnaatccacnactgnggn

SEQ ID NO: 431 - DNA, 430 bp, Homo sapiens
  misc_feature (1)...(430): n = A,T,C or G
acactaccaacagatcaaagaaacccctccggccagtgagaaagacaaaactgctaaggccaaggtccaacagactcctgatggatcccagcagagtccagatggcacacagcttccgtctggacaccccttgcctgccacaagccagggcactgcaagcaaatgccctttcctggcagcacagatgaatcagagaggcagcagtgtcttctgcaaagccagtcttgagcttcaggaggatgtgcaggaaatgaatgccgtgaggaaagaggttgctgaaacctcagcaggccccagtgtggttagtgtgaaaaccgatggaggggatcccagtggactgctgaagaacttccaggacattatgcaaaagcaaagaccaaaaaanaaannnnaaaaaaaaaagcttgtacctnggccgngaccacgctaa

SEQ ID NO: 432 - DNA, 479 bp, Homo sapiens
  misc_feature (1)...(479): n = A,T,C or G
acaagcttttttttttttttttttttttttttggaacgtaggctttctcttgtctttattctggggaggaggaatcctcctcatcatcttcctcatcttcatcattgaacgaacagggggtctcgcctcgggactcggagcagtgagaggccgcactgctggactggtgactgtttggggccaggaactgcccagttgctaaggccacttctgcatccaagcataacccttggtttacacttgactggggtaaggtggcaccagtggtcaggtctaaatttgaaactgattgggtagaagttcagaagtagtccctgatttaaccaagaaggtcctgtggagatatctgngatataaccttctaaagcctttggcaccagggatttcgcaagttttcaanatcctccagagagcatttgcctgacttcaggcnaaacgacattcccatncgctttangaccttgggcgngaccacgcta

SEQ ID NO: 433 - DNA, 600 bp, Homo sapiens
  misc_feature (1)...(600): n = A,T,C or G
ggtacccaacaataccaccgaccaggagctgcaacacattcgcaacagcctcccagacacagtgcggattaggcgggtggaggagcggttctcagccttgggcaatgtcaccacctgcaatgactacgtggccttggtccacccagacttggacagggagacagaagaaattctggcagatgtgctcaaggtggaagtcttcagacagacagtggccgaccaggtgctagtaggaagctactgtgtcttcagcaatcagggagggctggtgcatcccaagacttcaattgaagaccaggatgagctgtcctctcttcttcaagtcccccttgtggcggggactgtgaaccgaggcagtgaggtgattgctgctgggatggtggtgaatgactggtgtgccttctgtggcctggacacaaccagcacagagctgtcagtggtggagagtgtcttcaagctgaatgaagcccagcctagcaccattgccaccagcatgcgggattccctcattgacagcctcacctgagtcaccttccaagttgttccatgggctcctggctctggactgtggccaaccttctncacattccgccaatctgt

SEQ ID NO: 434 - DNA, 417 bp, Homo sapiens
ggtaccaacgcgctaagaaatcagctccaattcgaagtgcacctgttccccccaaagattgcacacctcctacccgcttctccttgagtgctgggctgtcatccccaagggcaagacgagaagcacagctccggaactcagccaggcccaggattggcagatactcgtgatttaggctattgtcattagcaatcttctgctccactttcttcactactggcaaaacccagggatggcagtcatccgtgcgatatgctcccactcccaggttgaccttgcgggggtccggatcctccctgaagtcggcagtgagcttgaagaccaggacaggctgggcctgcggaacctcggcaaagactgacggaggtgccatatcgagagactaggaatcaagagatttcaccccacgcccggagc

SEQ ID NO: 435 - DNA, 672 bp, Homo sapiens
  misc_feature (1)...(672): n = A,T,C or G
ggcagagaacgatgtggacaatgagctcttggactatgaagatgatgaggtggagacagcagctgggggagatggggctgaggcccctgccaagaaggatgtcaagggctcctatgtctccatccacagctctggctttcgtgacttcctgctcaagccagagttgctccgggccattgtcgactgtggctttgagcatccgtcagaagtccggcatgagtgcatccctcaggccattctgggaatggatgtcctgtgccaggccaagtcgggcatgggaaagacagcagtgtttgtcttggccacactgcaacagctggagccagttactgggcaggtgtctgtgctggtgatgtgtcacactcgggagttggcttttcaagatcagnaaggaatatgagcgcttcttttaatacatgcccaatgtcaaaggttgctggtttttttggtgggctggctatcaagaaaggatgaagaaggtgctgaanaaanaactgcccnatattcgtcctgggggacttcaagcccgtatnctaancctggcttcgaaataaganccttaancttaaacncataaacactttatttggatgaatgngntaanancttgaacagtngacatncttcggatgtcnggaaattttncnatgaccccccanaanngncntgntt

SEQ ID NO: 436 - DNA, 469 bp, Homo sapiens
ggtacaagctttttttttttttttttttttttttttataaaagcattttattgaacacattctggaggtaagttagaaccaaaacaaaatttgggattggggtggggattctgttttgatgatttagatttgggaaaactttggattctcgtgtcagcaggggccatgctgtgggaaacctgaaggctgatttgaagcagaatatagaactgcggcacgggagaccaggggctgggaatggggctctcctgggaaccaaagaatgtggttctgcaattggcttggtctagactactctccagaaaaggataaaacatggcttgagcaactgcctagaagaggcaatctccatgggctgggttgctgcacttggaaggcagtgacttgcagcaggttcttagctcttgaagctcttccgggaggaggaggtggtggagacaaatttgacgctggggctgctacccccgcc

SEQ ID NO: 437 - DNA, 457 bp, Homo sapiens
actgaggcatcttcttcagcatctgggacaggtcccgcatggtgggtcttctctccagtattcattctcttgctagaagaaaaatctttcagagaccggggtgacttctgggacacctctgcgatgtgcttgtggcgcagtgctatccacaggtcgtcgtcctcgtccaggagcacctccttcacccgtgcctccccgatgccgctggtctcatacttgtatacatcattttcgataggcagcagatcataactcatagcctgaaaagtcaattcatggagcacaggggagctggggtcaaagcctcgatccaggatcaggagctgggagcgtgccttgtctgggccctcccccattgttggatcatcagctttataggcatcgagcttgtcctggattagctgagccagcagggcattgtccttgtattccccccgataccgcatagccgggtacc

SEQ ID NO: 438 - DNA, 731 bp, Homo sapiens
  misc_feature (1)...(731): n = A,T,C or G
accaattattcagaatcaaatggatgcacttcttgattttaatgttaatagcaatgaacttacaaatggggtaataaatgctgccttcatgctcctgttcaaagatgccattagactgtttgcagcatacaatgaaggaattattaatttgttggaaaaatattttgatatgaaaaagaaccaatgcaaagaaggtcttgacatctataagaagttcctaactaggatgacaagaatctcagagttcctcaaagttgcagagcaagttggaattgacagaggtgatataccagacctttcacaggcccctagcagtcttcttgatgctttggaacaacatttagcttccttggaaggaaagaaaatcaaagattctacagctgcaagcagggcaactacactttccaatgcagtgtcttccctggcaagcactggtctatctctgaccaaagtggatgaaagggaaaagcaggcagcattagaggaagaacaggcacgtttgaaagctttaaaggaacagcgcctaaaagaacttgcaaagaaacctcatacctctttaacaactgcagcctctcctgtatccacctcagcaggagggataatgactgcaccagccattgacatattttctacccctagttcttctaacagcacatcaaagctgnccaatgatctgcttganttgcagcagccaacttttcacccatctgtacctttgggccgngaacacg

SEQ ID NO: 439 - DNA, 470 bp, Homo sapiens
ctgcgagccaggattcccgatccagagacaatggccccgatgggatggagcccgaaggcgtcatcgagagtaactggaatgagattgttgacagctttgatgacatgaacctctcggagtcccttctccgtggcatctacgcctatggttttgagaagccctctgccatccagcagcgagccattctaccttgtatcaagggttatgatgtgattgctcaagcccaatctgggactgggaaaacggccacatttgccatatcgattctgcagcagattgaattagatctaaaagccacccaggccttggtcctagcacccactcgagaattggctcagcagatacagaaggtggtcatggcactaggagactacatgggcgcctcctgtcacgcctgtatcgggggcaccaacgtgcgtgctgaggtgcagaaactgcagatggaagctccccacatcatcgtgggtacc

SEQ ID NO: 440 - DNA, 353 bp, Homo sapiens
  misc_feature (1)...(353): n = A,T,C or G
ggtacattgaagagaacaagtatagcagagccaaatctcctcagccacctgttgaagaagaagatgaacacttcgatgacacagtggtttgtcttgatacttataattgtggatctacattttaaaatatcaagagatcgtctcagtgcttcttcccttacaatggagaagttttgcttttctttgggctggaggaagagcatcctatggtgtgtcaaaaggcaaagtgtgttttgagatgaaggttacagagaagatcccagtnaggcatttatatcnnnngatattgacatacatgaagttcgnattggctggncactactcnnntggaatgntcttggngaanaanaatt

SEQ ID NO: 441 - DNA, 647 bp, Homo sapiens
  misc_feature (1)...(647): n = A,T,C or G
acattattgatgaacgcagtgactctgaagaataatcagaggatgacatgggagagcccaatggcttcattgattgcccatccctgtgaggacagggaaatgggagcttgtgggattctggggatgacagaggtgagtgaggtgaagccctaggggatggtgaatggtagctccggatccctggtgaggagcttcctcttaagtctgagttactgagagggaagagggagaagctgggtgaggctagcatcgtcgaccttggggaatccgggctgggggactgttcacaagaagagccagacaagaccctactgttcttaggtgcagacaggattatgaaacctgaagctcccagggaccccaacaaattttcaaaccctgagaatgaaggagtgtgtgtgactgtgagagtgtgtgtgtgtgtgtgtggtgtgaggtatgcgctccttaagaaaatggaaataaaccaaccaatgagacagacagacagacagagactcacttatccaagtgttctgtccagtcctctgaatccggttccaagtcgcaagaccctttgagctccaagtccatacagagcccggcaaaatgctccggcccgctgctcggctcttgtgacgatctgagtacctcgggccgngaccacg

SEQ ID NO: 442 - DNA, 1002 bp, Homo sapiens
  misc_feature (1)...(1002): n = A,T,C or G
acagaagttgaagtgaaatctactgaggaggcttttgaagttttctggagaggccagaaaaagagacgtattgctaatacccatttgaatcgtgagtccagccgttcccatagcgtgttcaacattaaattagttcaggctcccttggatgcagatggagacaatgtcttacaggaaaaagaacaaatcactataagtcagttgtccttggtagatcttgctggaagtgaaagaactaaccggaccagagcagaagggaacagattacgtgaagctggtaatattaatcagtcactaatgacgctaagaacatgtatggatgtcctaagagagaaccaaatgtatggaactaacaagatggttccatatcgagattcaaagttaacccatctgttcaagaactactttgatggggaaggaaaagtgcggatgatcgtgtgtgtgaaccccaaggctgaagattatgaagaaaacttgcaagtcatgagatttgcggaagtgactcaagaagttgaagtagcaagacctgtagacaaggcaatatgtggtttaacgcctgggaggagatacagaaaccagcctcgaggtccagttggaaatgaaccattggttacctgacgtgggtttgcagagttttcaccnttgncgtcatgcgaaattttggatatcaacgatgagcagacactttccangctgattggaagcccttagagaaacgacttacttacgacaaatggatgattggtgagtttaacaaaccatntaaagcttttaaagcttttgtaccagaaattggcaatgctggtttaagtnaaggaaaancccctgccanggggaacttaatggaaanggggaaaaagatttngncccaaattggaattnaaccncccgaaaaaaaaaannnnnnaaaaaagancttggncgggaaccccccttaggggaattcnncnccttgggggccnntnntaanggacccanttggnccaaaatttggggaaantg

SEQ ID NO: 443 - DNA, 486 bp, Homo sapiens
acattagtcttaattgacttattacataatcgattcgtgtctagttttgagagctttaagttctcaattatagttctttgaaaactgaatagcaaataacaatatgattaacttcatatttattatttcaacgatcttttttataaccgagtttaatttttaaattaaatttctaaaatagattaccaatattaaaataccttaagatatttatctttagcaataataggcaatattaaagttgtattaacttttaaattaagtaagagtatttggtggatgccttgggtctgaaagtcgatgaaggacgcgattacctgcgataagcttcgtggagttggaaataaactatgatacggagatttccgaatggggtaacctaactgagcaaacctcagttgcattttgatgaatccatagtcaaattagcgagacacgttgcgaattgaaacatcttagtagcaacaggaaaagaaaataaatacc

SEQ ID NO: 444 - DNA, 625 bp, Homo sapiens
  misc_feature (1)...(625): n = A,T,C or G
gagggatgcacgttgccttagccgagcttcggagagaagcctgatatgtaacccaggcaggtgggagcctcagtctgtcgggctgaggtctggcatctacaaagcctcttggccgtgttctgaacttgaagcctggaggagttctctgctcagcacagccaaggaacagaattagaagaaaaggaaccctggcctgaggcaggtgacaaacattaccaccccagctgtgcacgatgcagcagatgcaaccagatgttcacagaaggagaggaaatgtatcttcaaggctccaccgtttggcatcccgactgtaagcaatctacgaagaccgaggaaaagctgcggcctaccaggacatcctcggaaagtatttattctaggccaggctccagtattcctggctcaccaggtcatactatctatgcaaaagtagacaatgagatcctggattacaaggatttagcagccattccgaaggtcaaggcaatttatgacattgaacgtccagatcttattacctatgagcctttctacacttcgggctatgatgacaaacaggagagacagagccttggagagtctccgaggactttgnctnctacttcatcagcagaagggtacctcg

SEQ ID NO: 445 - DNA, 1002 bp, Homo sapiens
  misc_feature (1)...(1002): n = A,T,C or G
accacaactcccaggattttcctggatcaaaccttgtatctcttctgcaagtattgtgtatattggtctgagagacgtggaccctcctgaacattttattttaaagaactatgatatccagtatttttccatgagagatattgatcgacttggtatccagaaggtcatggaacgaacatttgatctgctgattggcaagagacaaagaccaatccatttgagttttgatattgatgcatttgaccctacactggctccagccacaggaactcctgttgtcgggggactaacctatcgagaaggcatgtatattgctgaggaaatacacaatacagggttgctatcagcactggatcttgttgaagtcaatcctcagttggccacctcagaggaagaggcgaagactacagctaacctggcagtagatgtgattgcttcaagctttggtcagacaagagaaggagggcatattgnctatgaccaacttcctactcccagttcaccagatgaatcagaaaatcaagcacgtgtgagaatttaggggacactgtgcactgacatgtttcacaacaggcattccagaattatgaggcattgaggggatagatgaatactaaatggttggctgggtcaatactgncttaatgagaacatttacacattctcacaattggtaaaggttcccctctattttggtgaccaatactactggaaatggaatttggntttttgcagttcacagggtantaatatggctcagtaccttnggccgcgaacacgcttaagggcnaattccacacacttgggcggccgttcttaanggatccgaactngganccaagcnttggcgtaaacatgggcnataantggtttctggggggaaatggtatccggttacaatttccccccanattccnaacccggaagncntnaagggtaaaacccggggggccctaanggggngctaactccaaatnaaatgggttgngcttaatggcccnt

SEQ ID NO: 446 - DNA, 367 bp, Homo sapiens
ggtacaaaagagtatgggctcacaagaagatgattcaggaaacaaaccatccagttattcttgaaactaacatccatcctgagctaaacaagagaaactaccatcttggccagtgacaagtgttcggagggcagcagagaggaccaagcctgtgtcacctggagactaagaaattaagttttgttttgacatcttcagtcctgtgtgctttcagaaaaccattttctctgcaaagaaaggaaacagatttgcaaactttaaagtctgtcgtggatttatttatcctcagattattgttactgcattaaatctacctttttgttttaagttgcttgaaaaaaaaaaaaaaaaaaaaaaaaaaaaaagc

SEQ ID NO: 447 - DNA, 754 bp, Homo sapiens
  misc_feature (1)...(754): n = A,T,C or G
actcttggggtggaaaagatctacacataacaagttcagaaaccacagtgataaactaacctaagaaaatcgtttaacttttatctacctgaaacacaaaattaaaaggcaacctataaactggaaaaaaatatttgcatcaaatataacaaaagattatcaatatccttaagatgtaaatggcttttgcaaaacaatcaatagaaaaatgactaggaattagaaaatcatacacacacacacacacacacacacgcacacacacacacaccacaaatggccaattgacacatggtagagatgttcagtcaccagcagacaaagcaatgttcacatccacagggaaagcagactcgatccgtcggaggagcaaaggttttcaatgtnataaagcccggttctgaggaaanangggaaggcatcagggtttncctcacccagtgaagaacacctaattngaaaaaaatcccttcccttgcttggggccagttttaaccaattatggaacccttgaaagtctttaaagaagtttnaaccagtcaatttncctttcttcngaaatggtatggtatttcaggcatttcccaaaggaggtttanccanccggaccgttgaaaaaaggtcntggaaccttccnagggnaaagttcatttgccaagggtnttaatttttcttaaggaagggaaaaaaaaaaancttgnaaaaatnccctnngattgnccccattggnaancccggnnatnggtttaaaatt

SEQ ID NO: 448 - DNA, 551 bp, Homo sapiens
accagaaccgagttcgggatactcacaggctcatcactcagatgcagctgagcctggcagaaagtgaagcttccttgggaaacactaacattcctgcctcagaccactacgtggggccaaatggctttaaaagtctggctcaggaggccacaagattagcagaaagccacgttgagtcagccagtaacatggagcaactgacaagggaaactgaggactattccaaacaagccctctcactggtgcgcaaggccctgcatgaaggagtcggaagcggaagcggtagcccggacggtgctgtggtgcaagggcttgtggaaaaattggagaaaaccaagtccctggcccagcagttgacaagggaggccactcaagcggaaattgaagcagataggtcttatcagcacagtctccgcctcctggattcagtgtctcggcttcagggagtcagtgatcagtcctttcaggtggaagaagcaaagaggatcaaacaaaaagcggattcactctcaagcctggtaaccaggcatatggatgagttcaagcgtacc

SEQ ID NO: 449 - DNA, 398 bp, Homo sapiens
accttcaacaggcatctcaacagccccatcaccaacacctgtgtgcaaggcatagccatcacgcggaaaagtctcaggactcagaactacaccataaatgcaggatctttttatttcatataaaaatgatcaatgtgaaaaaagccaaactgtatgctggttttacagactccgacccttcctgacagtcgtcttgtctggccaggctgggggcccagcattcctggaagggagagacagcccggcatctcagtatttcattgggacaacaagctggatgtggcagggaaagctgagagcgccaaggtccccttgctttatcccaagctcggagggacgcagcctggcatggctctggcctagcagccaggtgacatggccaggcaccttcctgtacc

SEQ ID NO: 450 - DNA, 672 bp, Homo sapiens
accttattagaaagcgacggcaaactatgtgccagcagccgcggtaatacataggtcgcaagcgttatccggaattattgggcgtaaagcgtccgtaggttttttgctaagtctggagttaaatgctgaagctcaacttcagtccgctttggatactggcaaaatagaattataaagaggttagcggaattcctagtgaagcggtggaatgcgtagatattaggaagaacaccaataggcgaaggcagctaactggttatatattgacactaagggacgaaagcgtggggagcaaacaggattagataccctggtagtccacgccgtaaacgatgatcattagttggtggaataatttcactaacgcagctaacgcgttaaatgatccgcctgagtagtatgctcgcaagagtgaaatttaaaggaattgacgggaacccgcacaagcggtggagcatgtggtttaatttgattctacgcgtagaaccttacccactcttgacatcttctgcaaagctatagagatatagtggaggttaacagaatgacagatggtgcatggttgtccgtcagctcgtgtcgtgagatgttaggttaagtcctgcaacgagcgcaacccttttctttagttactaatattaagttaaggactctagagatactggctggacc

SEQ ID NO: 451 - DNA, 554 bp, Homo sapiens
  misc_feature (1)...(554): n = A,T,C or G
acacgctgccaaagtaattcctgctcatccatgccctgtctctgtctcttttagagtcataccttatttgagtataggttgcttaattttgctagacttcctgaaaacactaaggtggagtatcagaagtgattttagtcacagttctgcgggagagcttagaataacatcctcctttgggaggtggtcttgggtgcgtggatgttggtatacagtctttattgtaagtctgatacaaaatgctaataaatttaatgtttttcttccttaatttattggcatagttcttcaggtagcacctcatttttattaatgatattgggattaactatgaacaagctatatgtagacatttgcatttaaggacattgcagtggttcaaagatcccatcattgcagcttgnatcctttagatccaatcggaaacttctggagcttacattaaatgctcatttgagctaaatagnaatctggtnaaccaganttgggcaatacttttaaaganactggggacnattanggntaganngggctatttcccctttnagggnggg

SEQ ID NO: 452 - DNA, 566 bp, Homo sapiens
  misc_feature (1)...(566): n = A,T,C or G
acaaataaattgtatgctttccggataagtgacatgtttatatggtgataaagggaattataatgctcttaactcttatgtagtatgttctcatcaaaatcaccaagcatgagaacactgtttagtctcattcatcactcagcacagcctctttctgtccacttcagggccaagtctttgccatggccccacataacgtgtaaattagcttcagggatcaaaaatctttgaaaacccagtttgctgagccttgaaggaagcctttagacccagcttcaatgaagtcacagctccctgagggtcctggtggactggaggcggcctcccaagcctgggagctgtgtgcctggatggtctcactggggtgatgacccaagctcatggctccctctcaacctctaacccttcttaacacaagtcacccctggncccctgagcactcctgaagtccctttgaaaggacatttctaggctnctaagangcctggttccttcagctggcaccctnantttaccagccnggnangcaggntttccaanttntgctgggtnaanaaancccgncc

SEQ ID NO: 453 - DNA, 688 bp, Homo sapiens
  misc_feature (1)...(688): n = A,T,C or G
ggtactcctacttcatttttgaaggcttgtaactgctgaggtgtaggtgctgtcacattcaacattttcactgccacatcaccatgccactttcccttgtagactgttccaaatgatccagatccaattctttgtcccactgtaatctgcccatcaggaatctcccaatcatcactcgagtcccgtctaccaagtgttttcattcgattcctgtcttctgaggatgaagatgacttcctttctcgctgaggtcctggagatttctgtaaggctttcacgttagttagtgagccaggtaatgaggcagggggggtagcagacaaacctgtggttgatcctccatcaccacgaaatccttggtctctaatcaagtcatcaatattgacaggttctattgtgtttatatgcacattggggagctgatgaggatcggnctcgttgcccaaattgaattccatgatcttcatctgctgggccgaanggctgnggaaatggaatgggttttgaagagaccgactggtgagaattggggcccaatanaatcnaggcgggtgccgaaagggatgatcncantgtaggcagtctttggtaaggaccctnttctgngggattgggggggttaannacttggggacaaccgcaaatcaantggcctattaanccttagggaaattntanctgccngggg

SEQ ID NO: 454 - DNA, 565 bp, Homo sapiens
  misc_feature (1)...(565): n = A,T,C or G
actggctgcgaggcgccagtcgatcaatgtatgacaggagctgagacttggccacaccaggatcccccatcagacagatgttgatgttgccccggattttcatgcctcgaggagactggtccacacccccgactagcaggagcagcagtgccttcttcacatcttcatgcccgtatatttctggggcgattgaagctgccagcttttcgtagaaaatcctcctctgcaatttgcctcagctcctccctggtgagctctccagccccagactcatcatcctcactcttgttcatcttcacaatccgatgggcttccaggtaggtttctgagagtaaaccctgtacttgatgcactttgcacagacagggtgtgttgaataggcattattttataaggaaaagaagtctgtggtgactggtttgaaataaagtggtaatggtgatggagggcagntcttttggatttgcctggtantgctgatgggagacnggagaccacctngggcgcgaacacgcttaaggggganaattcngcacactggggggccgtactataggngnccnnc

SEQ ID NO: 455 - DNA, 566 bp, Homo sapiens
  misc_feature (1)...(566): n = A,T,C or G
acagtcctgattgcatcataattgtggtttccaacccagtggacattcttacgtatgttacctggaaactaagtggattacccaaacaccgcgtgattggaagtggatgtaatctggattctgctagatttcgctaccttatggctgaaaaacttggcattcatcccagcagctgccatggatggattttgggggaacatggcgactcaagtgtggctgtgtggagtggtgtgaatgtggcaggtgtttctctccaggaattgaatccagaaatgggaactgacaatgatagtgaaaattggaaggaagtgcataagatggtggttgaaagtgcctatgaagtcctcaagctaaaaggatataccaactgggctattggattaagtgtggctgatcttattgaatccatgntgaaaaatctatccaggattcatcccgngtcaacnatggtnaaaggggaatgtatggcattggagaaatgaanctttcctngncccttccntgnatcccncaanggncccggggattnaacnagcggttttnaancccnaanctttaagggnggg

SEQ ID NO: 456 - DNA, 559 bp, Homo sapiens
  misc_feature (1)...(559): n = A,T,C or G
ggtcctggcctcagcccgccacatcaccctgacctgcttacgcccagattttcttcaatcacatctgaataaatcacttgaagaaagcttatagcttcattgcaccatgtgtggcatttgggcgctgtttggcagtgatgattgcctttctgttcagtgtctgagtgctatgaagattgcacacagaggtccagatgcattccgttttgagaatgtcaatggatacaccaactgctgctttggatttcaccggttggcggtagttgacccgctgtttggaatgcagccaattcgagtgaagaaatatccgtatttgtggctctgttacaatggtgaaatctacaaccataagaagatgcaacagcattttgaatttgaataccagaccaaagtggatggtgagataatccttcatctttatgacaaaggaggaattgagccaacaattgnatgttggatggtgggttgcatttggtttactggatactggcatagaaagtggtnctgggagaaaaacctatgggggcagancnttttttaagcctggccaananaggnt

SEQ ID NO: 457 - DNA, 552 bp, Homo sapiens
  misc_feature (1)...(552): n = A,T,C or G
gttacgacaaaatttaagaggaataacaaatacaaattttctgttaagaacggaaaggtgcaaactagcagagtcaatactggtaaccagaaggcactaatccaaacacataaatttcaaaagctggttatattatggaataccatatatactggcctttgccagtttgggatttctgcaatagcaataagcctcgtttctgtttccaattataacaacaaaaagatgagttactaatgaacattccactacagaagtctaggctatgttgataaattgaaaacttatctagactactctgtctaagagcaataaaaagtaaacactcttttatccagcagcactaggaaacagggtgaatttaccaagataaattaggttggggatacctactgccaacttgtgcggttgtcgaattcactgnaatatgtattcctcttattgatagagctcttgaatgnaaaccacctanaagtgaggggaaaagcttcaggatcatggnccacaattatgntatagngcttttngngggtngagccnaaccccgntncc

SEQ ID NO: 458 - DNA, 561 bp, Homo sapiens
  misc_feature (1)...(561): n = A,T,C or G
accccaacaatcttcaagccacagtccaagagaagtctcaggaaagcagacgtagaggaagaatccttagcactcaggaaacgaacaccatcagtagggaaagctatggacacacccaaaccagcaggaggtgatgagaaagacatgaaagcatttatgggaactccagtgcagaaattggacctgccaggaaatttacctggcagcaaaagatggccacaaactcctaaggaaaaggcccaggctctagaagacctggctggcttcaaagagctcttccagacaccaggcactgacaagcccacgactgatgagaaaactaccaaaatagcctgcaaatctccacaaccagacccagtggacaccccagcaagcacaaagcaacggccaagagaaacctcaggaaagcagacgtagaggaagaatttttagcactcaggaaacgaacaccatnagcaggccaagccntggncaccccaaaaccngcngtnagtggttgagnaaaaatttcncccanttttgggnaacttccggngcaaanttnggcccntntttggnaaa

SEQ ID NO: 459 - DNA, 468 bp, Homo sapiens
  misc_feature (1)...(468): n = A,T,C or G
ggtacctcgacatcctgaacactggataaaaaagttgattaaatccagaagtgcgatgtccctgtcttgtttatatgattcaatccagtcatccaccacggactgcattgcacttttccccagtttcaccacctcaaataatgtgacaggctccccttccccattctgttgagggtgtccattagctcttccacggcctgctcctctaattccagcttcaattctgctcttctcacctggagattttcgaggtttcttatttgtagatggaggccggccaggacgacccctttttctttttcctttgacctctgtttcttcaagctcgctgccagcatcggaatgggcagtagtttcattagttgaatcctgtaacactggtaattctgaagtaatcattgctggagaggcctttcacaatgcagcaaaataatcaagtgctgnacctggccgggccgggcgctcgaa

SEQ ID NO: 460 - DNA, 566 bp, Homo sapiens
  misc_feature (1)...(566): n = A,T,C or G
acttcttgcatgttgtcacatgttgctgtgagaatcaggtgctgcctatatggctccactgggagagggcagatggaagccgtcgcctcatctgtcgtggaacgtgtgctgtgcacctcctccctttgctgatcttaatctctgtccttttactgtaataaactgtaactgtgagcctaacagctttcctgagtctagtgagtccttctagcaaatgaaaggagggtggtcttggagacctatgaacttgcacctgcccccgtcgttttgaggtctggcacagggagggaggctggtctctttggagggggtcttcatccattggggtcgggtccaactctggaggcccacgtccttgccagctccagtctctctcccctctcagtcccgacgctgtcaccttgtgccctctgtctgtggatcctgggaagagctgntctctctgctcacagctgaatangagacatgcccattagctgaggcgcttgcatgcttgtactactcgattgncaaangtncaagngntcccannncnccccgggtctatgganaannggggggnanan

SEQ ID NO: 461 - DNA, 570 bp, Homo sapiens
  misc_feature (1)...(570): n = A,T,C or G
ggtactatagcatagcctgcctttgctggtgtgtggcgattaggcctggtggaactgccatcaataaatcaagcgtgatcagggtgaggaacagggaagaaggaaatgtggggaaatgggatgaacatcaggtggatcacagagatgcagtcatgggggtcaggtgtggtatccggaataatgtgggaggctggattgaagtccgggccaggaacaatggtaattgtgggacttaacaaaaagtgagaacagctgaaggagtcagggagcagaaagtatatgcgtcaggtgtgaggaagaaaatagattttggaagttatgagaaatgtagagagtgagttgagcatagtttgtgattttgagggcctctaatagtattaaagcagtggcagcccgctacaccgcagacatganggctaggctaaaacagtaagggccaagttgtttgcacagaaaggcttcagggtgccggtcctggctcttgggtaagaattttggaccggacttaaccatgcctaaggaaggggaaggagttgtngttttgtnaggggacccaggtttgggaaaann

SEQ ID NO: 462 - DNA, 573 bp, Homo sapiens
  misc_feature (1)...(573): n = A,T,C or G
cgaggtaccaccagtatatggaatgttagggaaaaactttgttccagttccttttttttttctttctactttcaagtttaagtgaaccatactgaaatgaccaacaagtctgcctgtaaagttacatgtcatgattgtgttgttaaatgattatgggggagaaaatgaagtaaatgttgctgatgatccccatatttattgatcatattaaggttgtttatatagtttggaaatgaccagccccctaagcagtgtttgattaacttatgctaatcagatgattactcatatattctgctaattttctagctttattcttgttatttggaaaaattattagccaaatgccttcctaggtggatccagttggaagatatgtccagaaacctgaagaaaaattgacgctgcctttgtgtgctggattgctctacttgattagatcatgatatatcaaggntgaatttttagagggaaaattaattctgatatcttattggatcccttgataagntttttcctggatttttttttttccccaaagaatttttcatttgngncctngcccggcgggcc

SEQ ID NO: 463 - DNA, 574 bp, Homo sapiens
  misc_feature (1)...(574): n = A,T,C or G
accatatcctgtgtttgaatcaaacccggagttcttctatgtggaaggcttgccagaggggattcccttccgaagccctacctggtttggaattccacgacttgaaaggatcgtccacgggagtaataaaatcaagttcgttgttaaaaaacctgaactagttatttcctacttgcctcctgggatggctagtaaaataaacactaaagctttgcagtcccccaaaagaccacgaagtcctgggagtaattcaaaggttcctgaaattgaggtcaccgtggaaggccctaataacaacaatcctcaaacctcagctgttcgaaccccgacccagactaacggttctaacgttcccttcaagccacgaagggaagagaggtttncttttgaggcctggaaatgcccaaaatcacnggccttaaaacaggaaggttggaaaatctctttcaatgagaaaatgtggggnaactcttgggccttaaacaagctgtgaaaggtgcccggtcccggtaatttggggccttttcccggaagacntttttgtggaaaggnttacctgangggggggcccttt

SEQ ID NO: 464 - DNA, 458 bp, Homo sapiens
ggtactgccgctcggagatctttacttgtttttactttgaacatgagcagagaaaagacaaagaaaaagatggccatggcaaagctgatccgatacacagctttataaccaaccagcacatcacaatctttatctgcatttatatcagcctcatggattttaaatcccccttcacaaaatccaggaatcttcttcaagtaagtttccatctcttttctctgcatgatataggatacgacagtgctcaggaggagaatgaaagcataaatgaggcgagtcaccgtggaattcttactgttaggacagcaactacacagcaaacatgaggcaccgctgcagaggcatggaacccagctggcgagggagaagacacccagcacagcccccatggtgacgccagtgatggaggtggccggtcctgaggctgctttctaacacggtggtaactgccagctgag

SEQ ID NO: 465 - DNA, 580 bp, Homo sapiens
  misc_feature (1)...(580): n = A,T,C or G
gcggccgangtacttcaccatcactgactccatggacttgatcagccgncgctggatgtatncagtctcagnagtnttgacagccgtgtnaatgagcccctcacgaccccccatggngtggaaaaagaactcagtgggtgtgaggccggctaggtaggagttctncacaaagccacggctctnaggcccgtagtcatccttgatgaagtgaggcagagtccggtgcttgaagccaaatggaatccgcttgccctcgacgttctgctgtncaacgacagcgatnacctgggagatgttaatcttggaacctttagctccggacacgaccatanacttgaagttgttgtattcanacagggatttctgagcagaggagccagtcttgtctcgggcatcgttaagaatgcgggtcacctgattctcaaacgtctgncgcagantggtccctggggngggctccagctcattgttgngngncttcttnatgacctctantacgtcctgnttggggcttttaanagggcctgaatgncccgggaaggnnttanaattncnatggggttcccaaggccanacttnn

SEQ ID NO: 466 - DNA, 566 bp, Homo sapiens
  misc_feature (1)...(566): n = A,T,C or G
caagccttttttttttttttttttttttttgggcatgcctgtgttgggttgacagtgagggtaataatgacttgttggttgattgtagatattgggctgttaattgtcagttcagtgttttaatctgacgcaggcttatgcggaggagaatgttttcatgttacttatactaacattagttcttctatagggtgatagattggtccaattgggtgtgaggagttcagttatatgtttgggattttttaggtagtgggtgttgagcttgaacgctttcttaattggtggctgcttttaggcctactatgggtgttaaattttttactctctctacaaggttttttcctagtgtccaaagagctgntcctctttggactaacagtaaatttacnagggggatttaaagggttctgggggccaaatttaaaggttgaactaagaattctatcttggaccaaccagnttttcaccangcctcgggaaggtttggccgcctntacctattaaacttncccctattttgggacctanaccgggnggggctccttttaacngggcntaagggg

SEQ ID NO: 467 - DNA, 597 bp, Homo sapiens
  misc_feature (1)...(597): n = A,T,C or G
gcgtggtccggccgaggtacgtgatgcccttacagctgaaaaatccaagattgagacagaaatcaagaacaagatgcaacagaaatcacagaagaaagcagaacttcttgataatgaaaaaccagctgctgtggttgctcccattacaacgggctatacggtgaaaatcagtaattatggatgggatcagtcagataagtttgtgaaaatctacattaccttaactggagttcatcaagttcccactgagaatgtgcaggtgcatttcacagagaggtcatttgatcttttggtaaagaatctaaatgggaagagttactccatgattgtgaacaatctcttgaaacccatctctgtggaaggcagttcaaaaaaagtcaagactgatacagttcttatattgtgtagaaagaaagtggaaaacacaaggtgggattacctgacccaggtttgaaaanggagtgcaaagaaaaaggagaagcccttnctatgacactggaaccagaatcctngtnaggggattgatgaaaggtcttaagaaaaatttttgaagaangngacattgattttgaagcgnaccctttattnangcttggg

SEQ ID NO: 468 - DNA, 562 bp, Homo sapiens
  misc_feature (1)...(562): n = A,T,C or G
ggtactggataaagggctgacatcaagagcaaacagaagtcttttcctagtgcatatgcaaactggccaattccttccaactgaatgcatatttgccagatgttactgttcatggagcaaatagtgggacttggctttgagaaggctagaaaagatgtaacttggtaggtgtgttcaccagacgtgatggcttggaggcctgggtgctccatcatcagctcctctcccatttcctcagtttcaagacaggtaaccaaataccaattttcttgacttgtgtattcttcaagtatagatgtcacaatctctctcagttcttctgggtttgttttaatatgtttttcgtgaagatcctcaacctccagcccagcagcccctgtaaccagttcattaaggatcatggcagcttgcttccggtaaaccacagattgatggtaaagttccataaagtgatccacaagcnaataaaagattnccataataaccaagtagcttgacaaacctggctnaagagcntgaagaatctcttatccgtgaagaaaccggaatatcttctntnggg

SEQ ID NO: 469 - DNA, 533 bp, Homo sapiens
  misc_feature (1)...(533): n = A,T,C or G
cgaggtaccaataccaccaattttgtagacatcctggagaggcaggcgcaagggcttgtcagttggacgagttggtggtaggatgcagtccagagcctcaagcagcgtggttccactggcattgccatccttacgggtgactttccatcccttgaaccaaggcatgttagcacttggctccagcatgttgtcaccattccaaccagaaattggcacaaatgctactgtgtcggggttgtagccaattttcttaatgtaagtgctgacttccttaacaatttcctcatatctcttctggctgtagggtgggctcagtggaatccattttgttaacaccgacaattagttgtttcacacccagtgtgtaagccagaagggcatgctctcgggtctgccattcttggagataccagcttcaaattcaccaacaccagcagcaacaatcaggacagcacaagtcaggctgagatgtcctgnaatcatgnttttgataaagctctgggtcctgggccatcaatgatagccatagtacc

SEQ ID NO: 470 - DNA, 672 bp, Homo sapiens
  misc_feature (1)...(672): n = A,T,C or G
ggtacaccatataaacagcagatgaagtcggagagatagtctaatacacttagatcatgttccaccacaatgatatatctatctggatttattagagatcgtatagtaatagcagcctttaaacgctgcttgacatctaggtaactagaaggctcatcaaacatgaaaatatcagctttctgtatgcaaacgacagcacaagcaaatctctgcaactctcctcctgaaagatcttcaacatttcgttcttttaggtgggttaaatcaagctgctgacatacaattgcctgtgtctttgtttcatcttttcggtccaaaatagatcccactgtcccctttgcagccttaggaatctggtctacatattgaggtttgatgatggcttttaggtcatcttctagaatctttggaaagnaattttgnaattcagatccacngaaataagtcaaaatcttctggcagtcaaggangatcatcggacctgncccggccggccgnttcgaaaggccaaattccagcacacttggccggccggtacttagnggaatccnagcttcgggancccangcnttggcgnnaatcatngggcataactgggttccctggggggaaaaatggtaatcccggttaccaanttcnccccnacataccnaacccggaagccttanangg

SEQ ID NO: 471 - DNA, 387 bp, Homo sapiens
cgaggtgagctttgaaacaactgatgagagcctgaggagccattttgagcaatggggaacgctcacggactgtgtggtaatgagagatccaaacaccaagcgctccaggggctttgggtttgtcacatatgccactgtggaggaggtggatgcagctatgaatgcaaggccacacaaggtggatggaagagttgtggaaccaaagagagctgtctccagagaagattctcaaagaccaggtgcccacttaactgtgaaaaagatatttgttggtggcattaaagaagacactgaagaacatcacctaagagattattttgaacagtatggaaaaattgaagtgattgaaatcatgactgactgagacctgcccgggccggccgtcga

SEQ ID NO: 472 - DNA, 241 bp, Homo sapiens
ggtacgaatcgtctcctggcactgtgcaggcccacagctgacggcgatgacctccttcaccagcttcttctccttgagccgcacagcctcctccaccgcgatctcacagaaggggttcatggagtgcttcacaccatccgtgaccacaccggtcctgtcaggcttcactcggatcttcacggcgtagtcgatgaccctcttgacagctacgagcacgcgcagctccgccatcttcccgccg

SEQ ID NO: 473 - DNA, 470 bp, Homo sapiens
ggtactagttcactatcggtgtctgattagtatttagccttaccgggtggtcccggcagattcagacagggtttcacgtgccccgccctactcaggatacatctatgagattttatgatttcgtatacaggaatatcaccttctatgttgaagctttccaacttcttctactatcataaaattttgtaactcaatgtaagatgtcctacaacccctttttacaggtttgggctctttcgctttcgctcgccactactgacgaaatcattatttattttcttttcctgttgctactaagatgtttcaattcgcaacgtgtctcgctaatttgactatggattcatcaaaatgcaactgaggtttgctcagttaggttaccccattcggaaatctccgtatcatagtttatttccaactccacgaagcttatcgcaggtaatcgcgtccttcatcgactttcagacccaagg

SEQ ID NO: 474 - DNA, 637 bp, Homo sapiens
  misc_feature (1)...(637): n = A,T,C or G
acctcttcctgataagattgaagtaaaaactggtgaggaagatgaagaagaattcttttgcaaccgcgcgaaattgtttcgtttcgatgtagaatccaaagaatggaaagaacgtgggattggcaatgtaaaaatactgaggcataaaacatctggtaaaattcgccttctaatgagacgagagcaagtattgaaaatctgtgcaaatcattacatcagtccagatatgaaattgacaccaaatgctggatcagacagatcttttgtatggcatgcccttgattatgcagatgagttgccaaaaccagaacaacttgctattaggttcaaaactcctgaggaagcagcactttttaaatgcaagtttgaagaagcccagagcattttaaaagccccaggaacaaatgtagccatggcgtcaaatcaggctgcagaattgtaaagaacccacaagtcatgataacnaggatatttgcaaatctgatgctggaaacctgattttgaatttcaggntgcaagaaagaaagggcttggtggcattgaaccactgntcattaagaatgcttcactgctaaaaatgngattatgccaaattaanccagcaataagactcgtggcccccttaactgaactgttt

SEQ ID NO: 475 - DNA, 647 bp, Homo sapiens
  misc_feature (1)...(647): n = A,T,C or G
ggtacaagccatagtggaaagaatgaatctctccctaaaatagcagttgcaaaagcagaaagggggagacagagaatatggaaccccacagatgcaactgaacctagcattattaacagtaaattttttgagcctgcccaaaggccacatgttatcagcagctgaagagcatctacagaaaccagctgcaaggacaaaaacagaacaactgatttggtggagagatccgataacacgaagttgggaaataggtaaaataataacttgggggagaggttatgcttgtgtttctccaggccaatatcaatagcctatttggataccatcaagacacctgaaaccttatcgtgagccagatgctgaggaatagactccgggagggatcctgagaaccccccagttgcagccatgtttgagactgatgctgaggaggactccaactgtcacgagcacagcccccatctggggacagatcaagaagctgtcacagatggaagaagaaaaccttgaggaaagcaggacaatcggtcccatgagtaaaatctgatggtagctataaaccggttttancacnccatgntattctttngttaaggctgacncngagaacaattatacctantggggatatttatcatcttggtngg

SEQ ID NO: 476 - DNA, 665 bp, Homo sapiens
  misc_feature (1)...(665): n = A,T,C or G
accttattagaaagcgacggcaaactatgtgccagcagccgcggtaatacataggtcgcaagcgttatccggaattattgggcgtaaagcgtccgtaggttttttgctaagtctggagttaaatgctgaagctcaacttcagtccgctttggatactggcaaaatagaattataaagaggttagcggaattcctagtgaagcggtggaatgcgtagatattaggaagaacaccaataggcgaaggcagctaactggttatatattgacactaagggacgaaagcgtggggagcaaacaggattagataccctggtagtccacgccgtaaacgatgatcattagttggtggaataatttcactaacgcagctaacgccgttaaatgatcccgcctgagtagtatgctcgcaagagtgaaatttaaaggaattgacgggaacccgcacaagccggtggaacatgtgggttaatttgattctacgccgtagaaccttacccacttcttggacatcttctgcaaagctatnggagatatagtgganggttaacagaatggcccgaaggtgcatgggtggccgcagctcgtgtcgtgagaaggtanggtnaagtcctgnaacgagcgccaaccntttctttagtactaatattaagttaaggactntagn

SEQ ID NO: 477 - DNA, 319 bp, Homo sapiens
cgaggtacttttcaattatgttaacgtaaaatactcgtaacgaatgtagtatgagtttaaagtgagcttttcagatcctataagtgcatcctaagtaatgacaggctttaagataaggaatatatgcattttgttaaggcagaaatctcataaaatttcatgaaaaaccatggtcaatccaatgatgcactttttaagacaagtttgtctggaaactggaagggtcaaaagacaacaaaaaagcacacaccaaaaaacctcactttaagcaaatctataacttgaaaaaaaaaaagcctaagaatattctgagagtggt

SEQ ID NO: 478 - DNA, 419 bp, Homo sapiens
acccacgatgatgtggggagcttccatctgcagtttctgcacctcagcacgcacgttggtgcccccgatacaggcgtgacaggaggcgcccatgtagtctcctagtgccatgaccaccttctgtatctgctgagccaattctcgagtgggtgctaggactaaggcctgggtggcttttagatctaattcaatctgctgcagaatcgatatggcaaatgtggccgttttcccagtcccagattgggcttgagcaatcacatcataacccttgatacaaggtagaatgggctcgctgctggatggcagagggcttctcaaaaccataggcgtagatgccacggagaagggactccgagaggttcatgtcatcaaagctgtcaacaatctcattccagttactctcgatgacgccttcgacc

SEQ ID NO: 479 - DNA, 312 bp, Homo sapiens
acatcctggagacctgaagaattctgttgaagtcgcactgaacaagttgctggatccaatccgggaaaagtttaatacccctgccctgaaaaaactggccagcgctgcctacccagatccctcaaagcagaagccaatggccaaaggccctgccaagaattcagaaccagaggaggtcatcccatcccggctggatatccgtgtggggaaaatcatcactgtggagaagcacccagatgcagacagcctgtatgtagagaagattgacgtgggggaagctgaaccacggactgtggtgagcggcctggtacc

SEQ ID NO: 480 - DNA, 640 bp, Homo sapiens
  misc_feature (1)...(640): n = A,T,C or G
ggtaccaacaattcctcctaccagtggctgagcatactctgcagagtcagcctgcagcactgtggtgacttctcttggactcaggtgattaacttcgctgctgctatagcgaactggggtttcctcatggtccactgcttttgcaggaagaaactgcttcattcctttccaccaacctgcccggccccagtaaggtaagtcataggtgccttcagtttttttctttctgtttctccagtgccaagcacacactaatatgagaatgagagtagtgaggaccatgaccagcacagggacaagaactgcagccagcgctacatctttggttacatttggagttacggtagtatttctgatatcaggactggcagttgtttgttctgtctgtgcaggaaattcattgctactgcgaagttgtagtggttgcgtaaattttggggcacgacctttggctattttggaggggctgtagtggttttgaggncattgctgttncnaagaggtggaggttgagtaagttttggangacnactttangaataaactgacatccgagcagttcattttcatggcaatttctgctgccatgggtaaggattactctaataaacgtgccataattggtggcaaaagtattccc

SEQ ID NO: 481 - DNA, 501 bp, Homo sapiens
ggtacatttccttgtagactctgttaatttcctgcagctcctggttggttctggagcagatgatctcaatgagagagtcctcgtcggttcccagccccttcatggaagcttttagctcagaagcgtcatactgagcaggtgtcttcaataggcccaaaatcaccgtctccaggtggccagataaggctgacttcagtgctgatgcaagttcctttttggtccttctctggtaggcgaaggcaatatcctgtctctgtgcattgctgcggttggtcaaaatgttgacaatggtgacctcatccacacctttggtcttgatggctgtttcaatgttcaaagcatcccgctcagcatcaaaagttagtataggctttgacagacccatatgcacttgggggtgtagagtgatcaccctccaagctgagcttgcacaggatttcgtgaacagtaagacattttgaaaggaagctgggcccgtgcgcccgagagctgaaagcgtcc

SEQ ID NO: 482 - DNA, 306 bp, Homo sapiens
ggtacctatacagggatggctcccacgcatccctcagtgaccccaaacccatctccacttacactcaggcactcccaggacctgacagctactccccgttatcgtccttcagttcgaagccctggccaatctaccagcccacatgacgcagttacctggccatttctccacggttcccgtgagggccccacacccagccgcacaagagcccctcctgcattccgtcctcacacacaggcctgtgtatgcacttgctactgtcacactcttgctagcagaagaggcccctgtaatggccgatatccc

SEQ ID NO: 483 - DNA, 663 bp, Homo sapiens
  misc_feature (1)...(663): n = A,T,C or G
acagaatttcttatttcttgaagactctgtggttgaccacttcttcattagttacctgcagcaagacaccttccattttactaccaacaccactgaaggaaccaagaaaagctttattaatgatcacttggcttgcctcagctgttgaaatgaagcactttacagtctttgtggcagcagaatatacttgtccatggttcatatcaatgccatggcaaataggaagaagctcagtatcggctcctcccaccataacccccacttcctccactgcctcctggaccatagtttcctccaccatatggtccccccatgttcctgctaccaccaaagtttccactcttcacacgggccaagtcagaaagaccatgacataaagagagatggcgaaactgaaacggattatttcttttgncttcaaaacatctcatcaatttatcactcatccattctacctgggacttagaaaactccaccacattgtaactgacattatttaggagtgccaatgagtaaacacccaatcctgnatctttagtccctccaaatctggatccaagaagtttagccaggttccaaacttntggctgntgggggccactgntattaacacattttcattancttgaannggttccaggacanttggcanaacttgttant

SEQ ID NO: 484 - DNA, 228 bp, Homo sapiens
cttgggtctgaaagtcgatgaaggacgcgattacctgcgataagcttcgtggagttggaaataaactatgatacggagatttccgaatggggtaacctaactgagcaaacctcagttgcattttgatgaatccatagtcaaattagcgagacacgttgcgaattgaaacatcttagtagcaacaggaaaagaaaaaaaaaaaaaaaaaaaaaaaaaaaagcttgtacc

SEQ ID NO: 485 - DNA, 672 bp, Homo sapiens
  misc_feature (1)...(672): n = A,T,C or G
acggagccctctgaaaaatgacaaagatggtatgatgtatggcccaccagtggggacttaccatgaccccagtgcccaggaggctgggcgctgcctaatgtctagtgatggtctgcctaacaagggcatggaattaaagcatggctcccagaagttacaagaatcctgttgggatctttctcggcaaacttctccagccaaaagcagcggtcctccaggaatgtccagtcaaaaaaggtatgggccgccccatgagactgatggacatggactagctgaggctacacagtcatccaaacctggtagtgttatgctgagacttccaggccaggaggatcattcttctcaaaaccccttaatcatgaggaggcgtgttcgttcttttatctctcccattcccagtaagagacagtcacaagatgtaaagaacagtagcactgaagataaaggtcgccttccttcactcatcaaaaagaaaggcgcttgattaaagcatttcaatttcctatggccccatcttttnttcacaggtccngggatantcaaggtctattnccttaagaagagaattnccttccangggncctttccnaggtccccaatagtttnaaaaactggncctggtnggtaancctttannaaagcccttggttaaaancccnaaananngng

SEQ ID NO: 486 - DNA, 637 bp, Homo sapiens
  misc_feature (1)...(637): n = A,T,C or G
ggtacaatagagctttggatctgatacaagaatttagaaatataaaacaaaataactataaaagttaggaggcatttgaatggcatttccttagaagaacctgctaactctgtatcattctgatgtggattcctagtcatgtggggtgaaatgcatatttttccccctttgctggatcactggcctttcttcaaaagctataatgccatgaacacacatcctaggagtctctataatgttaacagaagctccaaataccaagccaatcaaagatgggagagggcaggggaaccataaaggcgaagggtccaaaggtggctgttactgagaacttgccctttccaaaatgtgaaagtcatagtgcttcttgcttgttctcagcttaaacttgttaactgagttaatttgtttcttcagtgcattctgtgcagctgaaatggaggggaatgtggctaagacggtgtangtggangccaagtcactgggtttagaaccgttcaagggttggcagtggtggnccccactggccacagcagaaggggttgaccaccctgggttgggactggggggtncccgganncccccggatnttggngcccaattttaaagaagttnccccaaaaactttttaacttng

SEQ ID NO: 487 - DNA, 618 bp, Homo sapiens
  misc_feature (1)...(618): n = A,T,C or G
ggtacctcttcccatgactgcacccagctccaggggcccttgggacagccagagctgggtggggacagtgataggcccaaggtcccctccacatcccagcagcccaagcttaatagccctccccctcaacctcaccattgtgaagcacctactatgtgctgggtgcctcccacacttgctggggctcacggggcctccaacccatttaatcaccatgggaaactgttgtgggcgctgcttccaggataaggagactgaggcttagagagaggaggcagccccctccacaccagtggcctcgtggttattagcaaggctgggtaatgtgaaggcccaagagcagagtctgggcctctgactctgagtccactgctccatttataaccccagcctgacctgagactgtcggagaggctgtctggggcctttatcaaaaaaagactcagccaagacaaggaggtanagaggggactgggggactgggagtcaaaacccctggctggggttaagtccacgtntggcnagcactggctttttcttttgggccttggttccttgtgggcaaagaatgatgaccnctattttcaggacttttccttcngttncaaggtttttntg

SEQ ID NO: 488 - DNA, 618 bp, Homo sapiens
  misc_feature (1)...(618): n = A,T,C or G
ggtacagtcgtctgaagaagctctgagggcggcaggaccagccagcagcagcccaagcttccctccatccccctttaccctctttgctgcagagaaacttaagcaaaggggacagctgtgtgacatttggagagggggcctgggacttccatgccttaaacctacctcccacactcccaaggttggagcccagggcatcttgctggctacgcctcttctgtccctgttagacgtcctccgtccatatcagaactgtgccacaatgcagttctgagcaccgtgtcaagctgccctgagccacagtgggatgaaccagccggggccttatcgggctccagccatctcatgaggggagaggagacggaggggagtagagaagttacacagaaatgctgctggccaaatagcaaagacaacctgggaaaggaaaggtctttgtgggataatccatatgttaattattcaacttcatcaatcactttatttattttttttctaacttcttggagacttaatttactgntttattagggtgaaaactggcnttctangtagggttttnttatcccaggactaccttgggttttaanttaaaaaaaaaaagaaatggntnaaaaa

SEQ ID NO: 489 - DNA, 624 bp, Homo sapiens
  misc_feature (1)...(624): n = A,T,C or G
naggtnctgatgattctccanatccangtatagaatatgancncgnnctncgaaantggngtganttgattcctggggctgagtatcgatgtttatgncatggaaaacnagcttattggtatttctcagagagactacacacaatactatgatcatatttctaaacagnaggaagaaattcgcanatgcatacaagactttttcaagaaacacatacagtacaagcttttntnctatttaattgntgtntttttttgtggtaacnngaaagtttattnntgtctgaaagcttttataagtatttaaatnnacnnagtaatgaactattcaattgctgnaatcggtcaaaatttncnaaagncgcacacaaantnntatccttgnncacgnanctncatacactgnccctngccaaacacccttgccgggaaccaatcngcatgacatttctgggccggttaaatnttataaagccaagggcccnggcactggttaaggngggccttanaccttttaggggagggcccnaataccctnccncttaaacntctggggggnggtananatttcttataggnaccgnccctttaaatcnattgncanttttnngnccctttggttttt

SEQ ID NO: 490 - DNA, 620 bp, Homo sapiens
  misc_feature (1)...(620): n = A,T,C or G
ggtacctcttcccatgactgcacccagctccaggggcccttgggacagccagagctgggtggggacagtgataggcccaaggtcccctccacatcccagcagcccaagcttaatagccccccccctcaacctcaccattgtgaagcacctactatgtgctgggtgcctcccacacttgctggggctcacggggcctccaacccatttaatcaccatgggaaactgttgtgggcgctgcttccaggataaggagactgaggcttagagagaggaggcagccccctncacaccagtggcctcgtggttattagcaaggctgggtaatgtgaaggcccaagagcagagtctgggcctctgactctgagtccactgctccatttataaccccagcctgacctgagactgtcggaaggctgtctggggcctttatcaaaaaaaagactnagccaaacaaggaggtagagaggggactgggggactgggagtcanagccctggctgggttcangtccacgttgggcaggcacttgcttttctttttnggnctttggttccttgttggcaaaagagtgattgaaccccttattttcaagggcttttcnctnatgttncangntttnn

SEQ ID NO: 491 - DNA, 630 bp, Homo sapiens
  misc_feature (1)...(630): n = A,T,C or G
acatttccttgtagactctgttaatttcctgcagctcctggttggttctggagcagatgatctcaatgagagagtcctcgtcggttcccagccccttcgtggaagcttttagctcagaagcgtcatactgagcaggtgtcttcaataggcccaaaatcaccgtctccaggtggccagataaggctgacttcagtgctgatgcaagttcctttttggtccttctctggtaggcgaaggcaatatcctgtctctgtgcattgctgcggttggtcaaaatgttgacaatggtgacctcatccacacctttggtcttgatggctgtttcaatgttcaaagcatcccgctcagcatcaaagttagtataggctttgacagacccatatgcacttgggggtgtagagtgatcaccctccaagctgagcttgcacaggaattccgtgaacagtagacattttgaaggaagcttncttgaggcccaatgtgttcaacccaaccgggaaaactnttncgggtagaagtgaaatccgaagttgctattgcttccagaataacctgggncntnccccnaaaactttaaaacgttcccaccttgggcgggaacccncttaangggggaattcccgnccncng

SEQ ID NO: 492 - DNA, 412 bp, Homo sapiens
  misc_feature (1)...(412): n = A,T,C or G
acactaccaacagatcaaagaaacccctccggccagtgagaaagacaaaactgctaaggccaaggtccaacagactcctgatggatcccagcagagtccagatggcacacagcttccgtctggacaccccttgcctgccacaagccagggcactgcaagcaaatgccctttcctggcagcacagatgaatcagagaggcagcagtgtcttctgcaaagccagtcttgagcttcaggaggatgtgcaggaaatgaatgccgtgaggaaagaggttgctgaaacctcagcaggccccagtgtggttagtgtgaaaaccgatggaggggatcccagtggactgctgaagaacttccaggacattatgcaaaagcaaagaccanaaaaaaaaannnaaaaaaaaaaagcttgtacc

SEQ ID NO: 493 - DNA, 633 bp, Homo sapiens
  misc_feature (1)...(633): n = A,T,C or G
acactggccagtgtgtttttggcgattaaacataatcctgtgaatcagattaattcacttgctgagtgttcatttgcggcatccctctgttgggtcttgggggccctccacgacctcgtggggctccccgtggtccactctgcccagagcctcgcttgaaattctgctgatatccatcccgttgatagccagagtaatcccggggagcactgaactgagactgtgtataaccactgtttggagtgttagagaatgaagggcggtaaccatnatatcctcctctgaatccattggcagggccccggtatccattcatcaagcctctagcaccacgggagccttcacgagacgcaccacgactattgtaataggggctgattgctacgtggaaatncagtgttctgctgaagaagctgctggtgggtaccagtcacttgatgggactggtctgggggaacccatggtaaagtgcccaaccactggttgnaacttgtcttgcttgaanctctggttggtctaccttggggaagcttgactaaaaaaacttttggtataaattgggctgggaccccctangggngcaaccctgggccanntttttcctnanncttaaaaaggggggggnatgaaggn

SEQ ID NO: 494 - DNA, 609 bp, Homo sapiens
  misc_feature (1)...(609): n = A,T,C or G
acttaaaaggtaaagtagtaaccaaagagaaaatccaggaagccaaagatgtctacaaagaacatttccaagatgatgtctttaatgaaaagggatggaactacattcttgagaagtatgatgggcatcttccaatagaaataaaagctgttcctgagggctttgtcattcccagaggaaatgttctcttcacggtggaaaacacagatccagagtgttactggcttacaaattggattgagactattcttgttcagtcctggtatccaatcacagtggccacaaattctagagagcagaagaaaatattggccaaatatttgttagaaacttctggtaacttagatggtctggaatacaagttacatgattttggctacagaggagtctcttcccaagagactgctggcataggagcatctgctcacttggttaacttcaaaggaacagatacagtagcaggacttgctctaattaaaaaatattatggaacgaaagatnctgttccagctattctggtccacagcagaacacagtaccttggccgngacnacnctaaggcgaaatccgccactggggggccgttataanggatcccncttnggaccn

SEQ ID NO: 495 - DNA, 606 bp, Homo sapiens
  misc_feature (1)...(606): n = A,T,C or G
ggtaccaagctatctttgataataccactagtctgacggataaacacctggacccaatcagggaaaatctgggaaagcactggaaaaactgtgcccgtaaactgggcttcacacagtctcagattgatgaaattgaccatgactatgagcgagatggactgaaagaaaaggtttaccagatgctccaaaagtgggtgatgagggaaggcataaagggagccacggtggggaagctggcccaggcgctccaccagtgttcctggatcgaccttctgagcagcttgatttacgtcagccagaactaaccctggatgggctacggcagctgaagtggacgcctcacttagtggataaccccagaaagttggctgcctcagagcattcagaattctgtcctcactgataggggttctgtgtctgcagaaattttgtttcctgtacctgccnggcggncgctcaaagggcgaattcacacactgcggccgtactagtggatccaactcggaccaacttggcgtaatatggcatactgtttctgngggaaatgtatccgtccaattcncccacatacganccgancntaaaggtaagcttggggcctataat

SEQ ID NO: 496 - DNA, 279 bp, Homo sapiens
ggtactcaatgatgctggtcagcgacttccacgggagaaaatcttgctgaatgtccgtgaaatccttcccatatttttccagggcttcctcgaaaaggttggcctctgatgcagaccactcctccatctcgtccctgcagagcacgggcccgccctgcggcaccagcgccgagatggccttggagatgtcgtagatgttcttgtggagagtatccatggcgtggaacagggtgatgtctcgggaggcagctgcggcgctcatgtgcaggctgggctgtc

SEQ ID NO: 497 - DNA, 633 bp, Homo sapiens
  misc_feature (1)...(633): n = A,T,C or G
ggtacacaacagggcaaaagctttttcgcaagtcataaaattgagttgaaaataacttgttgattcagctacaggaagacaactaacaattaacaggctcatgaatatttatgaataaagtgccactaattttattgtaataagatataaatagaataaatcctgacatggatagtagcttctgtgttctctccatcctgagaacagaagggccataaaaaaacaaagaagcattaccaaaggggagttctagacccacacggggaactcctaatacaaaagcaacaagaaagacangtaagactttaaaagttgcagaagtcctaagaatagcgccaatgtagtaggccctttttaacaacaacaaanaataaaaataagagagagagagaaattagaaatttangaagttcattaaataactggtacttatattcaagggaatttattagtggccagcctantgggggacccagcntntaggaaaagacccttgaaaaggaccttcccncacctgggacanaaggatagnaccgaccccccagggaagnccgccntggaaangggatccnaacttgangctttttagggtttcaaaantccttgctnggccccaangggcaggntttnntn

SEQ ID NO: 498 - DNA, 601 bp, Homo sapiens
  misc_feature (1)...(601): n = A,T,C or G
acattcttcagaacagttttggtcgtttaaaaaaaatcacacatttataagcagtgatttcaatcatgtttaaaaacaaaaatattaaacaaattcatttcctaatccagatgatacagaatccaagaaatttctgtaggcacttcactttccatagaacttcttgttcagcaggtatatgagaaggtttacattcactttaaccttatcaaacattttcattacagctactccttcatattgcatctgaagtaaatcctgaatattgagttgcaccttttccatctcaacaccaaggaattttgatcttacatcgaaaatgcctacatcttcagtagctatgatatcaaatgtaacattcttaaactggtttgtttgaagatcatctatatctagcaggacacctttctcatgcagctttgctgcagtgtacaaactgcaggctccatcctcgtgggctcgcactatgtgcgcttttaaaaaatattatttctaataaatctttgaagttaaaataccgttctttcagttggnccaaaaaaaaannnnnnnnanganagaanngnaangaaagtggggtgnnnttggggnggaaaaacnn

SEQ ID NO: 499 - DNA, 293 bp, Homo sapiens
ggtactcaagcttttgacctcatgccttgtgtagtaaaaaaggatttgggggttttgtttggttcctgagagggttgtgttttgtttttgtttccttttgtttatgttttggcctttcctctttgtctttccatgtagaccagatatttgaaagggcagacgatggctagaggtgtaatgtgcagcttgtttatacggtattttgggaaacttaccttggatgggaaatcgaatcgtggattcaccaggccggtgctggcacactcaccctcgccctttccctccggttcagt

SEQ ID NO: 500 - DNA, 630 bp, Homo sapiens
  misc_feature (1)...(630): n = A,T,C or G
gggtactcatgaattcaagccacagagtggagcagagatcaaagaagggtgtgaaacacataaggttgccaacacaagttcttttcacacaactccaaacacatcactgggaatggttcaggcaacgccatccaaagtgcagccatcacccaccgtgcacacaaaagaagcattaggtttcatcatgaatatgtttcaggctcctacacttcctgatatttctgatgacaaagatgaatggcaatctctagatcaaaatgaagatgcatttgaagcccagtttcaaaaaaatgtaaggtcatctggggcttggggagtcaataagatcatctcttctttgncatctgcttttcatgtgtttgaagatggaaacaaagaaaattatggattaccacagcctaaaaataaacccacaggagccaggacctttggagaacgctctgtcacagacttncttcaaacccaaggaggaagtgcctnatgctgaaaagttttggatgactcaactggatggggtattccctgnaaccaaaacctggnacccaagtccttaaaanccnnggagacttacattntgntgnacaatttgggttaaaccnnttcncaaagctttccatgggggcanggccc

SEQ ID NO: 501 - DNA, 240 bp, Homo sapiens
acatctgaaataccccccaaacccagaaagcttttcaacagctaggttgtccaagaacttggaaaattcaccttctgatgtcctccaagacagattccattttttatacaccttatttgctcagacctgtaacttcagcctggagtgaacacagacacctagttttcctcaaactcctcttgggctttagagagaaggtgctggccctttgagccaagcaggttattggttagtagtacc

SEQ ID NO: 502 - DNA, 481 bp, Homo sapiens
  misc_feature (1)...(481): n = A,T,C or G
ggtacctgttcttctatccaaacctttcaattcatgctacctgattcatttatttgacatagatcttaggcccacttgaactcttttcttgtttatctagcatagcacaaacgtttttccagtcttctttatcaacactaatgcctcttaattgcatcagtatttcctattggaaaatacatctgttccagaaaaacatttggcattcctgaataatttccaaatgtttttaatccaaagaaaaaggtttaaagcttatttccctttcttatacacacctgaataaaattgatgtgcatgttttagggatcaattacctaactgttccttggtctatttatgtataagaatgctttttaaagcacatgtctcattttaaatgacgcacaaactgaagatgttaataaaatttaagagtaatacaatgaaaaatattantnttnnanatanaaaagcttggacctgccngggcggccgntcg

SEQ ID NO: 503 - DNA, 643 bp, Homo sapiens
  misc_feature (1)...(643): n = A,T,C or G
ggtactgcattatttgagaagctgctcaacttgcaaaatcagttttcctctcaataaaattatagctctaatgtttgcatataagggaagtagttatcatgttagtaatacctctaatagtataaaccccaccccaaaattagccagtaatcctgtaggaaggtacaagtctcagactaagtttttagccacttgtcaaattcagttttaaatgcttagaaaacactgaggacacctattgaggagggaggggggaaggtcacctgtaaaggagtccaaagtatgtgctggagcagatgatgacaaagacagaacatctaagaagatagacatggaggaaagggagtagtatttccacacactatgacattgaaaattcaatcatttatgataggattttgatccactgccattactaccttgtgggaaaaatctnccaatgaaaaggttgaaaaattcattctccaaaaattggcccngttttaangagaaaattttagagcagcaccnttaaaccatgccgggaactttggtttaacaaaatatngtggggccccaaaaagctcctgttgcttttaggcctcnagagatttacccagaacttaaaggnttncnctggccttgttccttaangttgaaaacc

SEQ ID NO: 504 - DNA, 624 bp, Homo sapiens
  misc_feature (1)...(624): n = A,T,C or G
ggtactgcattatttgagaagctgctcaacttgcaaaatcagttttcctctcaataaaattatagctctaatgtttgcatataagggaagtagttatcatgttagtaatacctctaatagtataaaccccaccccaaaattagccagtaatcctgtaggaaggtacaagtctcagactaagtttttagccacttgtcaaattcagttttaaatgcttagaaaacactgaggacacctattgaggagggaggggggaaggtcacctgtaaaggagtccaaagtatgtgctggagcagatgatgacaaagacagaacatctaagaagatagacatggaggaaagggagtagtatttccacacactatgacattgaaaattcaatcatttatgataggattttgatccactgnccattactaccttgtgggaaaaatccttcacaatgaaaagggttgaaaaattcattcttccaaaattggcccnngttttaaggagaaaatnttagagccgccccttaancctgcccggaacttggntttaccaaatntcagggngnccccaaaancttctgntgcctttangncntncanagacttnacccnngaacttcnaggntttncctng

SEQ ID NO: 505 - DNA, 652 bp, Homo sapiens
  misc_feature (1)...(652): n = A,T,C or G
acaagctacaaatgcttgttcagcagctgaggggcactcttgagtagcgtgtctgaagagtgaataaaaatccatataaaacaaatattcaaatagtttccataggaacacagataagtgtgacccatatcctagtcttccatatggctgcatcatggcgaccctactcttacaaagacatttcaaaactagcagtaattaagttacatggtccccccaaatcccttaattcaagctaaacttgcagttaacagctaccagagtgctatctacacattaatactagcccgaagcacaggctgctctgtggcgtttcatcccactctcccaggcacaagacacaggcagggtgctggcatcctgttcctctacttcgggtggggaaagtcggggttctggaattgctgcatgagttgccacgcaggccctgacatcacatagtaanatcgtccggccttttgggaaacccattgnacctanaaggcancnagcaaccagtggtaagccgccccaaggttttcnaaagagcctttccaatnaccccccatgccnttttaanggcnnggttaccaagggcttnaaaaaatccgatttnangggccnttacaaggttggggcccccanaatgcncggatngnaaaaaanacctttt

SEQ ID NO: 506 - DNA, 545 bp, Homo sapiens
  misc_feature (1)...(545): n = A,T,C or G
acaagctttttttttttttttttttttttttttttttatctaaaagtgcccaggtgggcttaaggctgccanactgcacgcacatctacagcaacaagggcttctattccatctacaacttggatcgggggaaaagggagatgtaggagaggaaggaaaaaagaggggaaaaatataccaccaaccctcccccacaaaaaaagggaaaaaaaaaaatcccaccacagggagatctatgtgccaagcataatggaagagtgtgctccccaaacagatggttttgcacaggctaatgttctgctggttttccttagagacctattttgaaaaagtttaaaaagacaggagatttcaaaataattcaatcctggcagaaattcaaactccaaaactaggagcaaaatcatccttcactgaattaattccttttctctttctcttttcttaaacattttattcattttatagaaagatttctttttttggntgcntttggtccaatcntttgganantggttgaaggagtaccttggncgnganccccc

SEQ ID NO: 507 - DNA, 625 bp, Homo sapiens
  misc_feature (1)...(625): n = A,T,C or G
acctgtctctctgccttctggaggctctctaggattggaaaagttcaagaaacccgagggaagctgggactgtgaattgtgcctagtgcagaataaggcagactctaccaaatgtttggcatgtgaaagtgcaaagccaggcacaaaatctgggtttaaaggctttgacacatcttcctcatcttcgaactcagcagcctcctcatccttcaaatttggtgtctcatcatcctcttctgggccttctcagactttaacaagcactggaaattttaaatttggagatcagggaggattcaaaataggtgtgtcatctgattctgggtctataaaccccatgagtgaaggctttaaattttctaaaccaataggagattttaaatttggagtttcatctgaatctaagcccgaagaagttaaaaaagatagtaagaatgataatttttaagtttggacttctttggtttaaccacccagtttctttaacttcatttcaattggggtatctaatcttggacaggaagaaaaagaaagangaacctggcccaaatctttcctntgcaggntttanccttnggacccttggccgcnaaccaccctaaggggggaattccnnacactgggg

SEQ ID NO: 508 - DNA, 612 bp, Homo sapiens
  misc_feature (1)...(612): n = A,T,C or G
ggtcgaagacagaggttcaggtcgttccaggggtagaggaggcatgaaggatgaccgtcgggacagatactctgcgggcaaaaggggtggatttaatacctttagagacagggaaaattatgacagaggttactctagcctgcttaaaagagattttggggcaaaaactcagaatggtgtttacagtgctgcaaattacaccaatgggagctttggaagtaattttgtgtctgctggtatacagaccagttttaggactggtaatccaacagggacttaccagaatggttatgatagcactcagcaatacggaagtaatgttccaaatatgcacaatggtatgaaccaacaggcatatgcatatcctgctactgcagctgcacctatgattggttatccaatgccaacaggatattcccaataagactttagaagtatatgtaaatgnctggttttcataattgctctttatattgggnggtatctgaccagatagtattttaagaaacatgggaattgcanaaatgactgnagtgcaanagtaattntngggcacttttcgtttttaagntggaaattcnctacanttcctgaaccantttanggtttttt

SEQ ID NO: 509 - DNA, 473 bp, Homo sapiens
  misc_feature (1)...(473): n = A,T,C or G
cttgggtctgaaagtcgatgaaggacgcgattacctgcgataagcttcgtggagttggaaataaactatgatacggagatttccgaatggggtaacctaactgagcaaacctcagttgcattttgatgaatccatagtcaaattagcgagacacgttgcgaattgaaacatcttagtagcaacaggaaaagaaaataaataatgatttcgtcagtagtggcgagcgaaagcgaaagagcccaaacctgtaaaaaggggttgtaggacatcttacattgagttacaaaattttatgatagtagaagaagttggaaagcttcaacatagaaggtgatattcctgtatacgaaatcataaaatctnatagatgtatcctgagtagggcggggcaccgtgaaaccctgtctgaatctgccgggaccaccccggtaaggctaatactaatcanacaccgatagtgaactagtacctng

SEQ ID NO: 510 - DNA, 632 bp, Homo sapiens
  misc_feature (1)...(632): n = A,T,C or G
ggtacctatgtggattccaagagcctgatagcattcttgtccttcagagcctccctggcaaacaattaccatcacacaaagccatactttttgtgcctcggcgagatcccagtcgagaactttgggatggtccgcgatctggcactgatggagcaatagctctaactggagtagacgaagcctatacgctagaagaatttcaacatcttctaccaaaaatgaaagctgagacgaacatggtttggtatgactggatgaggccctcacatgcacagcttcactctgactatatgcagcccctgactgaggccaaagccaagagcaagaacaaggttcggggtgttcagcagctgatacagcgcctccggctgatcaagtctcctgcagaaattgaacgaatgcagattgctgggaagctgacatcacaggctttcatagaaaccatgttnaccagtaaaagcccctgtggaagaaccnttctttatgctaagtttgaatttgaatgcccggctcgtggcgcagacattttaacctattcancttgtggtggcttggnggtaattcggnccaaacactttgcncttttgtgaaaaaaaatcncctcttcanggttggggnaanggggcttttgg

SEQ ID NO: 511 - DNA, 616 bp, Homo sapiens
  misc_feature (1)...(616): n = A,T,C or G
acagaacctaaaggtttcactgaatgcgaaatgacgaaatctagccctttgaaaataacattgtttttagaagaggacaaatccttaaaagtaacatcagacccaaaggttgagcagaaaattgaagtgatacgtgaaattgagatgagtgtggatgatgatgatatcaatagttcgaaagtaattaatgacctcttcagtgatgtcctagaggaaggtgaactagatatggagaagagccaagaggagatggatcaagcattagcagaaagcagcgaagaacaggaagatgcactgaatatctcctcaatgtctttacttgcaccattggcacaaacagttggtgtggtaagtccagagagtttagtgtccacacctagactggaattgaaagacaccagcagaagtgatgaaagtccaaaaccaggaaaattccaaagaactcgtgtccctcgagctgaatctggtgatagcccttggttctgaagatcgtgacttctttacagcattgatgcatatagatctcaaagattnanagaaacnggaatgtccatcaataaacnaggtgattgttnggaaggaagatgttctttttaaaaatnaatgtttnatntng

SEQ ID NO: 512 - DNA, 619 bp, Homo sapiens
  misc_feature (1)...(619): n = A,T,C or G
ggtaccggtctttctcaaatatcatcagcaccctcaatcccactgctaaacgacatttggtcctcgcctgccactatgactccaagtatttttcccactggaacaacagagtgtttgtaggagccactgattcagccgtgccatgtgcaatgatgttggaacttgctcgtgccttagacaagaaactcctttccttaaagactgtttcagactccaagccagatttgtcactccagctgatcttctttgatggtgaagaggcttttcttcactggtctcctcaagattctctctatgggtctcgacacttagctgcaaagatggcatcgaccccgcacccacctggagcgagaggcaccagccaactgcatggcatggatttattggtcttattggatttgattggagctccaaacccaacgtttcccaatttttttccaaactcagccaggtggttcgaaagacttcaagcaattgaacatgaacttcatgaattgggttgcttcaaggatcactcttttggaagggcgggatttnccgaaatacnggttttggaggngtgaatcagggatgaccntattccctttttaanaaaaaggggttcccntntgcntntgnn

SEQ ID NO: 513 - DNA, 175 bp, Homo sapiens
ggtacatcctcggccgggagtccccactgtctctctacaatgaggagctggtgagcatgaacgtgcagggtgattatgagccaactgatgccaccgggttcatcaacatcaattccctcaggctgaaggaatatcatcgtctccagagcaaggtcactgccaaatagacccgtgt

SEQ ID NO: 514 - DNA, 597 bp, Homo sapiens
  misc_feature (1)...(597): n = A,T,C or G
actagttactgcatctgattttacagacagagaagagtcaaggcccagagagcagacagctcaccccaacatcacacagcagtcagctgcgaggggcttggtgctactcagatttctcctaagaatgtttggaaacaacctgagggagagttaagtaataaaggaaaatcacaaacagagacagagacccagaaagggactcacgggaataaaagcagaaagtgacagagatacatagagatgatgagacagagacagagagatcagagatagggttcagaaaaaaagaagagagaggctgggcacagttgctcacgccagtaatcccagcactttgagaggcggagatgggaggatctcttgagcccaggagtttgagaccagcctggacagcatagtaagaccccatctttatttaaaaaaaagttttattaatttaaaaaaaatgccnagagagataaccccccntagaaggttggaaagccaaaagctttttgggggcttaaaagnaccccaacccggnccngggaganaggtttttttttgagggaanaatccggttcttggccangcttaannggcctatttccaaaaaac

SEQ ID NO: 515 - DNA, 574 bp, Homo sapiens
  misc_feature (1)...(574): n = A,T,C or G
ggtacactggttgatatgaagattgaatttggtgttgatgtaaccaccaaagaaattgttcttgctgatgttattgacaatgattcctggagactctggccatcaggagatcgaagccaacagaaagacaaacagtcttatcgggacctcaaagaagtaactcctgaagggctccaaatggtaaagaaaaactttgagtgggttgcagagagagtagagttgcttttgaaatcagaaagtcagtgcagggttgtagtgttgatgggctctacttctgatcttggtcactgtgaaaaaatcaagaaggcctgtggaaattttggcattccatgtgaacttcgagtaacatctgcgcataaaggaccagatgaaactctgaggattaaagctgagtatgaaggggatggcattcctactgtatttgtggcagtggcaggcagaagtaatggttngggaccagtgatgtctgggaacactgcatatnccgttatnagctggcntcncttanaccaactggggaagttcaggatgtgtgggcttctctttgactnccaatggncttggctntcaaccn

SEQ ID NO: 516 - DNA, 450 bp, Homo sapiens
  misc_feature (1)...(450): n = A,T,C or G
aaaaaggcgtaaagcggaaagcagatactaccacccctacacctacagccatcttggctcctggttctccagctagccctcctgggagtcttgagcctaaggcagcacggcttccccctatgcgtagagagagtggtcgccccatcaagcccccacgcaaagacttgcctgactctcagcaacaacaccagagctctaagaaaggaaagctttcagaacagttaaaacattgcaatggcattttgaaggagttactctctaagaagcatgctgcctatgcttggcctttctataaaccagtggatgcttctgcacttggcctgcatgactaccatgacatcattaagcaccccatggacctcagcactgtcaagcggaagatggagaaccgtgattaccgggatgcacaggagtttgctgctgatgtacctcgggcgcgaacacgcttan

SEQ ID NO: 517 - DNA, 611 bp, Homo sapiens
  misc_feature (1)...(611): n = A,T,C or G
actcctctgaggactacattaagtcaggagctcttcttgcctgtggcatagtgaactctggggtccggaatgagtgtgaccctgctctggcactgctctcagactatgttctccacaacagcaacaccatgagacttggttccatctttgggctaggcttggcttatgctggctcaaatcgtgaagatgtcctaacactgctgctgcctgtgatgggagattcaaagtccagcatggaggtggcaggtgtcacagctttagcctgtggaatgatagcagtagggtcctgcaatggagatgtaacttccactatccttcagaccatcatggagaagtcagagactgagctcaaggatacttatgctcgttggcttcctcttggactgggtctcaaccacctggggaagggtgaggccatcgangcaatcctggctgcactggaaggtgngcanaaccntttcgcanttttgnccacacacctggnggatgtgtgngcctattcncgcttttggnanatgcctnaagggcnacaaattggtccaatttgnnnnnaacctttgcctccaaagaaagggggaaanaaaagtttcccccnanngggggcgggcccc

SEQ ID NO: 518 - DNA, 395 bp, Homo sapiens
ggtgatttatctaatcagaactcttcagatcaggcaaatgaagaatgggaaacagcttctgaaagcagtgatttcaatgagaggcgagagagggatgaaaaaaaaaatgctgacttgaatgcacaaacagttgtaaaggttggagagaatgttctacctccaaagagggaaattgcaaagagaagtttttctagtcagagaccagtagatcgtcagaatcgacgtggcaacaatggtccacccaaatcaggaaggaatttctcaggtcctagaaatgaaaggagaagtggcccaccatcaaaaagtgggaagagagggccatttgatgaccagcctgcaggcacaactggggttgacctcatcaatggcagctctgcacaccatcaggaaggagt

SEQ ID NO: 519 - DNA, 626 bp, Homo sapiens
  misc_feature (1)...(626): n = A,T,C or G
ggtaccgaaagcacagtaatcactggtgtcgatattgtcatgaaccatcacctgcaggaaacaagtttcacaaaagaagcctacaagaagtactgattttaaaaactaataacttaaaactgccacacgcaaaaaagaaaaccaaagtggtccacaaaacattctcctttccttctgaaggttttacgatgcattgttatcattaaccagtcttttactactaaacttaaatggccaattgaaacaaacagttctgagaccgttcttccaccactgattaagagtggggtggcaggtattagggataatattcatttagccttctgagctttctgggcagacttggtgaccttgccagctccagcagccttcttgccactgctttgatgacacccaccgcaactgtctgnctcatatcacgaacagcaaagcgacccaaangtggatagtctgagaagctnttcaacacacatnggctttgccaggaancntttntaccatgggagcnttcccngacttttagnaaattaagggcntttttcactttttaacccaaacggggaaaaatttttnctttaagttaanaaacttgcnntgcaatggaanccgnngggaatccaatacgg

SEQ ID NO: 520 - DNA, 322 bp, Homo sapiens
ggtacccaagcatctagtctggaactgacagagataaatagagaaaatgttccaaagtctggcacgccccagcttaggctgccattcgctgcaaggttgaacacccccatgggccctggacgaactgtcgtcgttaaaggagaagtgaatgcaaatgccaaaagctttaatgttgacctactagcaggaaaatcaaaggatattgctctacacttgaacccacgcctgaatattaaagcatttgtaagaaattcttttcttcaggagtcctggggagaagaagagagaaatattacctctttcccatttagtcctgggatgt

SEQ ID NO: 521 - DNA, 613 bp, Homo sapiens
  misc_feature (1)...(613): n = A,T,C or G
ggtaccatcctcatctcggtgggatgtgcagttttctgtgcccttatcgtctggttctttgtatgtcccaggatgaagagaaaaattgaacgagaaataaagtgtagtccttctgaaagccccttaatggaaaaaaagaatagcttgaaagaagaccatgaagaaacaaagttgtctgttggtgatattgaaaacaagcatcctgtttctgaggtagggcctgccactgtgcccctccaggctgtggtggaggagagaacagtctcattcaaacttggagatttggaggaagctccagagagagagaggcttcccagcgtggacttgaaagaggaaaccagcatagatagcaccgtgaatggtgcagtgcagttgcctaatgggaaccttgtccagttcagtcaaagccgtcagcaaccaaataaactncagtggccactaccagtatcacaccgtgcataaaggattccgggctgtancttgcccggccggccgtntaaaggcgaattccagncacttgggggccgntctaaagggatnccactttggnccaacnttgggggaatctngggcaaantngtccctgngnaaatggtatccgtcaaatncccnn

SEQ ID NO: 522 - DNA, 319 bp, Homo sapiens
accagggaggcatgacattgcttttgttgaatttgaaaatgatgggcaggctggagctgccagggatgctttacagggatttaagatcacaccgtcccatgctatgaagatcacctatgccaagaaataacatttgggatagtcgtctttaaaagacttggtgttatttacagtgtttgttttgataacatttggctgggtcattttaatagttagagatgaggaggagtaaaagtgaaatttttgtgaaggacttaaattatccagtgtttctttagccttggtgaactatgaaatacgaaggccttaattttgtacc

SEQ ID NO: 523 - DNA, 589 bp, Homo sapiens
  misc_feature (1)...(589): n = A,T,C or G
acagcgcgcggctctacacgcttgggtagcgggataagtcactgttttctttatttctttaaaaaaaaaaaagttctgttgcaaacgactgctgttggattctgagggtggggagggagagagagggagggagagggagtgaagagcctgccctcctatatggattcttcagggccctccacatctgaggtggctcattcccatcacacacagattgtcctggtgttcatttcaaggccagtgttcagcagcagcgtttggaaagcaggttctgtgggaccccccgccccgcccccacactccttcatagcagcagtagtggcttctccatcctgntttctgcaacattctatacaaaactgtgctgtgaccttgcggtaagcctggatctggcaaagagaatcaaatgaaaccccttctttctcttttcgtccacaactctgtanaactntntgnacccttacccctttccaccttttggattnaattttaaggccgtgnanctttggccggaacacccttagggcnaattcnnnccattgggggccgtctaagggannccaattggnccaanttgggnaacanggnn

SEQ ID NO: 524 - DNA, 621 bp, Homo sapiens
  misc_feature (1)...(621): n = A,T,C or G
ggtacattggagagatctcgcctactgccctgcggggtgcctttggcactctcaaccagctgggcatcgttgttggaattctggtggcccagatctttggtctggaattcatccttgggtctgaagagctatggccgctgctactgggttttaccatccttcctgctatcctacaaagtgcagcccttccattttgccctgaaagtcccagatttttgctcattaacagaaaagaagaggagaatgctaagcagatcctccagcggttgtggggcacccaggatgtatcccaagacatccaggagatgaaagatgagagtgcaaggatgtcacaagaaaagcaagtcaccgtgctagagctctttagagtgtcagctacccgacagtccatcatcatttccattgtgctccagctctntcgcagcttcttgggatcaatgctgngttctaatactcaccaggaatcttcaaggatgcaggtggttaaaaancccatttatgccncctttgggcccggtgngggtnaaaccanacttnccnnggaggnncctnttttnnngggggaanggccngaaaaaaggncttcgcctttaaanngcccttggagggaagntttttttn

SEQ ID NO: 525 - DNA, 384 bp, Homo sapiens
acagcactttgagaggacatcactagacaagtaatacacacatggcctgcaggaggtcaagggcggcgagggggctgggcaggggacatttttgtgacttccactgttattatatttcacgacaacagcagcagcacaaatggtgtgctcaccactggagaatgagagctgctgagtcttgaggatggcgagacagccttcctgcatttgctgctttagtttctgctttagagctaagttttatacagagaataaaatgaccatcttctcttacaaacacgatgatgtatgaccccacacaacacaaggtattatgaagtatctgaaactgaggataatctgactgaagatgcttgccgagagggtacctcggccgcgccacgc

SEQ ID NO: 526 - DNA, 621 bp, Homo sapiens
  misc_feature (1)...(621): n = A,T,C or G
actgtagctccccatgagatgtgatgagtatgccttcacccttggtgtcatactggggtcttccggcacgtcccagcatctgcagaatgtccagtgctcccagttctgtccaacgccccttctctggactgtacaatgtcactgacggatcctgccagctgtttgtgtatgggggctgtgacggaaacagcaataattacctgaccaaggaggagtgcctcaagaaatgtgccactgtcacagagaatgncangggtgacctggccacnagcangaatgcagcggattcctctgcccaagtgcttnagaaggcagnattctgaagactactncagcgatatgttcaactatgangaatactgcacngtnaaccgcattnactgggntttgncngtgcatccttcnacgctggtaccttcggcccgggaccacgcttaagggcgaatncangnactactggccgggtcgttactantngaatccgagnttcgnnaccaagctttgcgtaaaatattgggcataagttggntttctgngngaaaaatggtanatcngttnanaattcccnaatatatncanccngtncctttaattntaaatccgggggtnntaantnantnn

SEQ ID NO: 527 - DNA, 611 bp, Homo sapiens
  misc_feature (1)...(611): n = A,T,C or G
acagctcatccacttcctcatctgtaaaccgatcccccatggttgtcagcagctctcttaggtaatcttcctgaatggtgcctgttgcttcttcatcaaagcaagcaaaggcgtttctgatgacatcttcaggatctgtgccatttaacttctcaccaaacatggtcaggaacatggtgaaattgatgggccctggggcctcattcatcatggcatcaaggtatgcatcagtgggattcttccctagagaagcaagcatatcatgcaaatcttccttgtcgatgaagccatctctgttctgatcaatcatgttgaaggcctctttgaactcctgaatctgtgattggtcaaacatggcaaacacattggatgttgcacgctgagggcgcttcttggtggtcttggtctttgcctttttgcttcgacatggtggntggttaattncgacgcccaaacaccagaacccggggccancctgcgcganaacgcaaccaaaaccttnggccggaacacccttaaggggaaatcccnncactggggggccgtataanggganccnanttnggaccaaacttggnggaaaaangggcaaaanngttcctgnggaaann

SEQ ID NO: 528 - DNA, 593 bp, Homo sapiens
  misc_feature (1)...(593): n = A,T,C or G
acaagctttttttttttttttttttttttttaggtagtgggtgttgagcttgaacgctttcttaattggtggctgcttttaggcctactatgggtgttaaattttttactctctctacaaggttttttcctagtgtccaaagagctgttcctctttggactaacagttaaatttacaaggggatttagagggttctgtgggcaaatttaaagttgaactaagattctatcttggacaaccagctatcaccaggctcggtaggtttgtcgcctctacctataaatcttcccactattttgctacatagacgggtgtgctcttttagctgntcttaggtagctcgtctggtttcgggggtcttanctttggctctccttgcaaaggtatttctagntaattcattatgcnnaaagnatangggtaagccctgctatataagcctgggtataaattttcancctttcctttgnggaccctnggccggaacaccctaagggcgaaatccanccactgggggccgtactaaagggatcccaacttgggnccaacttggnnnaaaccggggcanaanngtccctggggnaaatggnanc

SEQ ID NO: 529 - DNA, 251 bp, Homo sapiens
accattggtggccaattgatttgatggtaagggagggatcgttgacctcgtctgttatgtaaaggatgcgtagggatgggagggcgatgaggactaggatgatggcgggcaggatagttcagacggtttctatttcctgagcgtctgagatgttagtattagttagttttgttgtgagtgttaggaaaagggcatacaggactaggaagcagataaggaaaatgattatgagggcgtgatcatgaaagacc

SEQ ID NO: 530 - DNA, 601 bp, Homo sapiens
  misc_feature (1)...(601): n = A,T,C or G
acagtataaaatgtttccataggaacacaaaagaaactgtcactagtggcctgctgtcagatggcttctaattcatcagttagccatttttaggacactagtccagcttattgctacaatcttcaagttgttctagtcacccaaattataatgaattcaatgtataccagaatttaccaataaaggctcaaagagttatataatatacaccaatatacacaaaacagctattctgagtaaaatgaatattccatacttaaataagaaccaagaatagtaattttaggctactctattatccttgtgattggtatttttaaaattttgagcaaagtgcacagtgaatgaaacagtcagcagacacgatccttctgtgaactctcaaattcctgccttagaatcacgtcacctgagaaatgagaacctttgagacctggtgcatatcaaatagcttcacatgtcaaaccacaggggccgcttggangccattctngggcacaggangncaactggttcnttnaaaatggnncccttncctgtgcangggccctgtgttaaaggccccaaaaccggcctcnggggaaacaaggttgntaattaa

SEQ ID NO: 531 - DNA, 607 bp, Homo sapiens
  misc_feature (1)...(607): n = A,T,C or G
ggtacaagctttttttttttttttttttttttttttttctcagccttggatttcttcttagcttccttctgctttaagctcttggtctcttgtttccgctnatttctggcctgcccttggatagtagtctgacactctccccgttgaaccttctgcctcatcttcttcttgcttttagcaatctttgctttatcctcctcattcaatgtttcttgggcctccagtttctttagggggcggttgtctgtcttgttcaatagctcagtgattttgaccttaggtggccgacctcgaccccgtttcaccttggggacttccttagtcttagccttctcagtgtttcaaggtcgaccccgtttgccagtaattgcctgaatcctcgacgggatctcctctgctgaaagctgcacccactgcaagccctttggcgngnctcttttcttcaaagaaatctccaacanggcatacggggactgaancttaanngcttnttggnggaaactgggnacctggccgggcangggcctntgttttacctnctggnaatnaaaagggaaaatncaaaantttaccctnttnaccnngtttntggggtngggggaaaang

SEQ ID NO: 532 - DNA, 608 bp, Homo sapiens
  misc_feature (1)...(608): n = A,T,C or G
ggtactgaacaggtaagtcatccctcagccagagattagtctacttcttccatgcgtgatgtgtcgtcatctccttcaaggggtggcatttcttcagttacagcagcactggtatcatcagcagtagggtcatcttcatcaatacccagaccaagtttgatcatcctgtagatcctgttagcatgtgtctggggatcttccagactgaagccagaagacaggagcgcagtttcataaagcaagatgaccagatccttcacagacttgtcgttcttatcagcctctgccttttgccttaaggtctcaataatggaatggtcagggtttatctccaggtgtttctttgctgccatgtaacccattgttgagtngctcttagggcttgagctttcatgattcgctccatgtttgctgtccagccatatgtgcttgngacaatcagcatggaaantcaccaatccggttgacacaaccacntttcactttttctccaaanngcctttcatgantttcnnanggtntcaaactttgggttttcncntnccgggtcntttcncnttttaaacccttnggaattccngccttttttgggacnnacnntaagnttt

SEQ ID NO: 533 - DNA, 593 bp, Homo sapiens
  misc_feature (1)...(593): n = A,T,C or G
acacatttgctgatggcttctcaaaacctgagccgagaatagggtctgatagcccagccaagtttaaaagcagacacacacgaatgtagtatcgttgtgcctgaaatgaccattctgggttgtttagaatccagaatcatcaaaagccatgtggtatgaggaagtaataaatatcctcttgaatcttcttaccctattttgcacaaatggatggctgcatgaacagctcttgtaaattgctctgagtccacaccaatagaaacctgcactcattctatagctacagagggtttgttggcttaaggggactttatcatctcagcattaatttcccttttaaagctattctcaaggttggactgtctcagagataaacaaagaggaatccttttggcttagaagccaactggcttactcagacttcctcccttcctactccaattcccacactaccatantatcntcttgactagaaaatcaattatttacctgacataagggcaagtctattctttttccannccttgccctnggggccttggnaanaaaaatccntgcctttttggaanaagttttgggacnngcttaggttt

SEQ ID NO: 534 - DNA, 608 bp, Homo sapiens
  misc_feature (1)...(608): n = A,T,C or G
ggtacacttctgtttatatttaaacaacaaagaaaaaagcatctacacacttaaaaaattaattcaatattcctaaatctattttaactcattttaaaatactacatacagaagccagaatgcagggttaagaatggaataaggtggggagaagaaggggaccacgaagaaaaacacttagacaattacttgtctgttgtgggtaaagcaacaggaatcctgggagatacaagaaatcagtaacaactttgctcataactgatattttcccctcatgtttgtttttaataacgtccatatgggtgctctctgtatgctcccttcactggcctagcaggaggggccttnagcgacggcctggtcccattccagtccgtcctggccataagcttcataagaatcttgaacctncccatgtccatagtcataatattctgagtccccttgactctggctgnaaataancttcgtagccttngaactttggtctgcgnatgnatnatcatatncctaatcntcanaagnttntngngcccgaagttggnggcaagggttctttnggaanccccttnccngcctttggggnctggacncnctnanagnggggg

SEQ ID NO: 535 - DNA, 603 bp, Homo sapiens
  misc_feature (1)...(603): n = A,T,C or G
acaaagtgacccctcgctcctgccaccggtttgagcaagcgttctacacctatgacacgtcttcacctagtatcttgacattgacagccattcgccaccatgtccttggaactatcaccaccgacaaaatgatggatgtcactgtgactatcaagtcttccatcgacagtgaacccgccttggtcttaggccctctgaagtctgtgcaggagctgcggagggagcagcagctggctgagatcgaggcccgcaggcaggagagggagaaaaacggcaatgaggaaggtgaagaaagaatgaccaagcctcccgtgcaggagatggtagatgagttacaaggccccttctcgtatgatttctcttactgggcgcnggnctggagagaaaattactgnttcacngtcatctnaagaactgctcttttatccccctttcaatggaaagcncgttgntcangtgggaagaaagcttgcncaagggaaanttggattcgagatncnccgggaaaaggccaggcctggtttttaaaaagggcccnaatnccccccggnanttgnaaagggaatccnaaattggtcttccntnngaaaaggggncaagttn

SEQ ID NO: 536 - DNA, 581 bp, Homo sapiens
  misc_feature (1)...(581): n = A,T,C or G
ggtactcctgggaggcttttgacagccacgggcaggagagcagcggccagcttcccgaggagctctttctgctgctccagtctttggtcatggctacccacgaaaaggacacggaagccatcaagtcgctgcaggtggagatgtggccactgttgactgctgagcagaaccacctccttcacctcgttctacaagaaaccatctccccctcaggacagggagtctgatccatcccattcacccagtgacttctttttgcccaggcctggactttttgcatcagtcacgttaaccagatgactttgcctgttaccaaacctcatgcatccacgtttgcgtctggggaggaataaaaagacatcgttcccgcttctgcgttttgntattcctactgccgccataggaattatttcgtggctgaacgttacccagcancccgagaacacttttggatagaattngagttgaggacattggctggcttttaaaaancccnncttggaaatngnaatncctttcgntcctttctccggnggttccncctnanggnanttttggttcgctttgntncaaagngaggg

SEQ ID NO: 537 - DNA, 568 bp, Homo sapiens
  misc_feature (1)...(568): n = A,T,C or G
ggtacggactactcccctcacatgcgtcctacctgtgaaactctgggaagcaggaaggcccaagacctggtgctggatactatgtgtctgtccactgacgactgtcaaggcctcatttgcagaggccaccggagctagggcactagcctgacttttaaggcagtgtgtctttctgagcactgtagaccaagcccttggagctgctggtttagccttgcacctggggaaaggatgtatttatttgtattttcatatatcagccaaaagctgaatggaaaagttaagaacattcctaggtggccttattctaataagtttcttctgtctgttttgtttttcaattgaaaagtaattaaataacagatttagaatctagtgagagcctcctctctggtgggtggtggcatttaagggtcaaaccancnanaaatgcttggtgctggttnaaaaagctcangtggctgctgtggtggctnatgcctgnaatccaacattntgggaaggccaagccggaaaactgttgngccnnganttaaaataanctgggcacntacaannttcgtttnna

SEQ ID NO: 538 - DNA, 598 bp, Homo sapiens
  misc_feature (1)...(598): n = A,T,C or G
ggttttttttttttttngttcatgtcttttattaactcatacagttacttgtcttctggtttgttgaaacagtaagtcagacaacntttgccacaataatgtctgtcaaagtgacttgccataaanaccccancaccacattcatcataagggcactcttgacgaaggcgactaattttgccattctatttcaggacagccagctaaaccttctntctcttgtgcttattcttcttgggagtggtgtaagacttcttcttccttttcttagcaccaccacgaagtcttaacacatgatgaagantagactccttttgaatattgtagtcngacaagagtncatacatcataccaacttnntanatacacagctcagttaattagcttgatggcacagttatngttnggaanagagangagtgcancatangnangagtgangnggngattcccacaattttctnagaacngaanagtaggnngaattagtaggtactggaaatgaaatnnggcttagcctgnctggnttagaaanaagaattcnaagccctttgtcaananttntcaaaaagtnactttangcctatnttgcgggnag

SEQ ID NO: 539 - DNA, 607 bp, Homo sapiens
  misc_feature (1)...(607): n = A,T,C or G
ggtacaggctttaacagaaattcaggagttcatcagctttataagcaaacaaggcaatttatcatctcaagttccccttaagagacttctgaacacctggacaaacagatatccagatgctaaaatggacccaatgaacatctgggatgacatcatcacaaatcgatgtttctttctcagcaaaatagaggagaagcttacccctcttccagaagataatagtatgaatgtggatcaagatggagaccccagtgacaggatggaagtgcaagagcaggaagaagatatcagctccctgatcaggagttgcaagttttccatgaaaatgaagatgatngacagtgcccggaagcagaacaatttctcacttgctatgaaaactactgaaggagcttgcataaagagtcaaaaaaccagagacgaattggctggtgagctggggtgccaaactactggcgnctggagccccttacccgggagcccgggncccanggnttggtcttganncaggggcttcaattggccttgaaaacnagtcttttttggttggattagnaacncacngtgtcaagctnctttaagccaaaaattntccnggnttttnccg

SEQ ID NO: 540 - DNA, 432 bp, Homo sapiens
  misc_feature (1)...(432): n = A,T,C or G
ggtactgatcattctatttccccctctattgatccccacctccaaatatctcatcaacaaccgactaatcaccacccaacaatgactaatcaaactaacctcaaaacaaatgataaccatacacaacactaaaggacgaacctgatctctcatactagtatccttaatcatttttattgccacaactaacctcctcggactcctgcctcactcatttacaccaaccacccaactatctataaacctagccatggccatccccttatgagcgggcgcagtgattataggctttcgctctaagattaaaaatgccctagcccacttcttaccacaaggcacacctacaccccttatccccatactagttattatcgaaaccatcagcctactcattcaaccaatagccctggccgncctcggncgtgaccacgc

SEQ ID NO: 541 - DNA, 597 bp, Homo sapiens
  misc_feature (1)...(597): n = A,T,C or G
gggtaccggcgtgtcaaaaaaatgtcagatgacgaggacgatgacgaggaggaatatggcaaggaggaacatgaaaaagaagctattgcggaagaaatcttccaggatggggaaggggaagaagggcaggaggccatggaggcccccatggctcctccagaggaggaggaagaagatgatgaggagtcagatattgacgacttcattgtggatgatgatggacagcctctgaaaaaacctaagtggcggaaaaagcttcctggatacacagacgcggccctgcaagaagcccaggaaatcttcggtgtggactttgactatgatgaatttgagaaatacaatgagtatgatgaagaactggaggaagagtatgagtatgaggatgatgangctgatggtgaaatccgatgcccccccagaagaccacccagaaacngtgttgagcccntnggagcnttttttgaaatggtttganncccngtngggctttnaaagccnncnccttacnnattnggggccttngantcccngcccttncctgccttnaaagggtccannttccgttncttcccagtcanggggnttaaaaatnatnan

SEQ ID NO: 542 - DNA, 577 bp, Homo sapiens
  misc_feature (1)...(577): n = A,T,C or G
gcccaaggctcagccagtctctatttaagaaaatttaacaaatacgagtaaccctgtcccaatcactgaatctctagttactactcttagaaacacctgtggcttcttggccctcctgttgcccgctctgaatctctctgcagtctacaaaatcgccccagtcaactctccacttggagggaattgtccagtgtggcccctagaattgagtcaccccctagataccaactgtctgaccccgaggagctctgtaagtccctgctcctcctcttccctttggggctggtgctgccactcagcaataatcctcttttctctgtgctttcttaggtccctgtcctctgtctttgaggctggttaggaagcaagagtcctgatctttcatgctgcacaatatgagcatgcaaaaagctttttccagcagaacatgttccctcgtctccagttgcccggaaaaggaatttgggggatcaaagaacttagcttggnctaccccatggttgagttctggccttggaaaancccaagccaagtnanggaccnagaccttggccggaaaccnttaagggcaattccn

SEQ ID NO: 543 - DNA, 607 bp, Homo sapiens
  misc_feature (1)...(607): n = A,T,C or G
tcgagcggccgtccggcaggtacattattgggcctcatttgcccagcaacggggcatccagattgagtgcagtcagggccatgtcttcactcgggggactcancaggcttatacctcaagcaggcacagtgatgcggcgccttatctctgattggagtgttacccanatggtgagtgacctaagtcaggtgaccgttcacctgatggcctcacccactgaagagaatgctgatcactgtcttgatcccttggtaacaaagacccacctgctgagcttgtcctccctcacctaccaacggnntancaattcgcacagctgacgaggagctctctgntcgtgatggggatcctacctttcatacanatcagctgcacttagtnnanttacngatttctggacaaactaccaatcganacattgcctttgggtaattgatgggtccctnggccgngacaancttaggggcgaatttccatncaactgggcgggccgntactancngnatcctanctttgggacctaatcttgttgtanccatggcnttacntgtacctctgggtaatcntatccngtnaantatccnnanctttactngccnganntnng

SEQ ID NO: 544 - DNA, 570 bp, Homo sapiens
  misc_feature (1)...(570): n = A,T,C or G
acttgggcttctttcagctgcttcaacagagtggcagcaaccaagctggagtccaagccccctgataaaaggcagccaatccttctgtctgtcatcaaacgtttctttacagcattattaaaaaggatcctgaggttgttcttcacagtttctatctcaaaacctggaaagagtttctccacattgtcatagagggcgtgcaggggttcatcccgacagtgatgatatttaaccatttccacggatgcaactttgccatttggctttaaatccaaaacttcatagtgtccaggaagaaaaggctccacttttaaaaagggagtcgcggagtgcttcaatgtaacaagacctttagcttctgaacatacagccaaaaatccatcttctgtcattgctttaaacaaaggtctgactccatatgtatctctacccaggaacactttcttattggcagtatccagtaaaacaaatgcnaacacaccatccaacatacaaattgnttgctcaattcctcctttggcataaagatgaaggattatctcaccaatccacttttggnctggnattcaa

SEQ ID NO: 545 - DNA, 330 bp, Homo sapiens
accgtccaggatctccaggtcatagccatcagccagacaccagttgacgcttgtctccttagtcttcccggattgccttttggaatcatatatgctgactctgccaaccttggggtggttgacaataaagggatgtcgtagtccatcctcaaatgcactcccatctcttgtcacacgacagcaaatagcacgggtcagatgcccttggctgaaaaggtaacccaatgtgacagatttgagataaatgggctgcaggaagtgggtcaacagtgccccttgcaggcccagcacgttccagcgtaggattttgtcactacaggacatggtacc

SEQ ID NO: 546 - DNA, 589 bp, Homo sapiens
  misc_feature (1)...(589): n = A,T,C or G
ggtaccagaggcactgtggatgggccacggaatgaattgtcccgggtctccaaaaagaacatttttcttctatttaagaagctctgctccttccgttaccgcagggatctactgagactctcctatggtgaggccaagaaagctgcccgtgactacgagacggccaagaactacttcaaaaaaggcctgaaggatatgggctatgggaactggattagcaaaccccaggaggaaaagaacttttatctctgcccagtatagtatgctccagtgacagatggattagggcgtgtcatactagggtgtgagagaggtaggtcgtagcattcctcatcacatggtcaggggatttttttttttccttttttttttctttttaagccataattggtgatactgaaaactttggggttcccatttatcctgctttctttgggattgctaagcaaggncttggccaagccccccctttttttcccccaaggngaaaagnccnaaancctaanaagntatcctttctttttancccaaggcttcccttagcccttggnccncctgggggncccnttcctttaaaangtttnggttt

SEQ ID NO: 547 - DNA, 613 bp, Homo sapiens
  misc_feature (1)...(613): n = A,T,C or G
ggtaccaggtttaaatgtagtcttctggagaagtatttttgacattgagctctgggacaggacaccttgggtttgtggactgcagcccactatgatgttattacttctctggccaggcctccagtggaagtgcacaggcactcccaatgttgttaatgctctgtcttccatttgttctggaatcctacgtgttggtctgtggttccatgcattagctgtttgtaaataatgcatttgcatactgaaaaaggaatgccacctgccacagttgatggtgaggaagctcctttgacgtggtgcaattttgatgagatgtctctggggacacgaggatgccctaatgatgctgacttgtcatggttgcagcatttgaacttttggtgttaaaaanaaaaacctgtnagtctggaaccctggcaacattttacaaccctngnatttttaaaagaaggcntttcttattaaaaaaattcnnaaacnccaccagnncctattgggtcaaaccaattcctncncttntggggccnctggttttttaaaggggcctttgctngaancaattggnantcccangggtttcganaaaaantgaaatggttttnnnccnccctcc

SEQ ID NO: 548 - DNA, 578 bp, Homo sapiens
  misc_feature (1)...(578): n = A,T,C or G
ggtacatatgtattttacaatatacttaccatgagtttagaaaaatttgaattcccaccattctataccaaccaaccacaaccccactgtctacattccccagccagaagacttagaatccatgcttgagccaaagcctccattaaaaccactgcccgaccctgcattggatgctgatccccaaccaattgctgcaccagaattagagccactataagagttatttccagaaccgaaggcctggtttggctccctctgcatgttgccttggttttggttattacccgatgggcctgactggttctgctggctggctaacatgcccatcataccccaactgctctgtantgctgcctgggcggcagccatcatggctggattaatgctgaacgcacccaagttcatccaccaccatattactacctttgatggttnccaaancaagtcacccctntggttattaccaaatccaccctggatcccaaagccccctgggattaccccccaaantttcncttntttntaaatngccaatgnttatggggcttaaggtcngcnttngatttttgaaccctgnt

SEQ ID NO: 549 - DNA, 620 bp, Homo sapiens
  misc_feature (1)...(620): n = A,T,C or G
ggtacgcatgtcacttcccatcatggaaccactcatggttgctggtggaacgccaggattagcttcataacctatgccaccaccacctcctagaggtggaaatttctggcctcctgaaccatagggatctcccatgttcattgctcctccgccacccattcgcatgtctctttcccgtggatccatgtagcccattcggctgtaactttcctctctttggcgcctcatttgttcttccatctcacgttgacgaatcatcatctcttcctctcttctacgtcgntcctcctcttgcctcaattgcatttctttacgtttctgcatttcttgattgtgaaagttcttccatgcgtcttaattcttcctgtcgtctcatcagatcttggcgcaaaagatttgcctgatgttcatgatanggcattttccatttcacttttccaatttggncttttggcancttttcanngntgtntttcaaacttnggtnccttttggctgggnttttcccatntcnatncanatgagnnttgnnntgggnggggagnantggtngggncctannctgtccggcccntntnaaangggcgnaatttcnnaagccncatgggngggccggtant

SEQ ID NO: 550 - DNA, 577 bp, Homo sapiens
  misc_feature (1)...(577): n = A,T,C or G
acctatgtttcacctcctggaaatgaagaggaagaatcaaaaatcttcaccactcttgaccctgcttctctggcttggctgactgaggaggagccagaaccagcagaggtcacaagcacctcccagagccctcactctccagattccagtcagagctccctggctcaggaggaagaggaggaagaccaagggagaaccaggaaacggaaacagagtggtcattccccagcccgggctggaaagcagcgcatgaaggagaaagaacaggagaatgaaaggaaagtggcacagctagctgaagagaatgaacggctcaagcaggaaatcgagcgcctgaccagggaagtagaggcgactcgccgagctctgattgaccgaatgggtgaatctgcaccaagcatgaaccaattggggagcatcaagtcccccacttgggccacacttacccaccttttccagaagtggcttctgnctacctttnacttanngccatggtgggnaccttaattcccattccccagggggaagntttgaattaccaaagggaagggtttnacctngttttagaaattngccc

SEQ ID NO: 551 - DNA, 573 bp, Homo sapiens
  misc_feature (1)...(573): n = A,T,C or G
ggtacaaaccatcttctactgtgacttcttctacttgtatgtgaccaaagtccttaagggaaagaagttaagtcttccaatgccaatctgaggaccttcagagacagtctacgccttaacaagcacatgaaggaaactattttgaatgttctctttggcaacttatccataatttgggatcaaatgttaaaaccagaaaagtgtttagtgtggatttcagcaaaacctgatcatcccacccagaagaccttctcatcaatagatcgcccttaaagacccattgtaaggtcataaaaaacctcggccaactgcacaaagatggtgcctcactgcaacaagaaaccttaaggtgtcttaccgacgaaataaaaaacataaatgattgntctccaaaggcctgagggcaagactcatgatgagcaagtcaacccccaatctggaacaatggccttctnttaaaatgncccacttaagacccgttaaaatattaggganctggcccggcggccctttaaanggcnaattcngncnctggnggccntacttangggaccaacttnggnccangttngg

SEQ ID NO: 552 - DNA, 581 bp, Homo sapiens
  misc_feature (1)...(581): n = A,T,C or G
ggtacattcaggaataatcatatcactggttacatacaactctcatgcaaagaaaaccctcaaaaaacaaacaaaaaaaaccctcagttagttgttttcttaagtctaattaatccaaactaataatagccatttaattagcaatctgtaaatcagagaggtatagaaattcagcagctaaactgtattttccacctatagcactgctgctactcaaactattttcttcacgtattagaagaattcataggcattgatggtcaaaataagaatttcaacatagcagcaaatgacagaagagtgagagaaagagctcctaatgtggtgacagtcttaatgatcctttaaaaggtagaagattgngtgcgtatgtgtggaaaggagtaggaaagaaaagcatgaggttaagacaggtatttaaagggaatggcgagatagctaccttagaatatttatttttttaaaaaactgctctgaaatctgcccagtgtacctgcccggcngncnttcnaagggcnaattttgncnnatntnnttcancttggcgggccgtnnacctggntttttaanggccccanttc

SEQ ID NO: 553 - DNA, 575 bp, Homo sapiens
  misc_feature (1)...(575): n = A,T,C or G
ggtactgcccttggaacctttgctgagggctttgtaattcctagttaaaatccatttgtaatattgtttctgtaaagcactcatttccattcttaaaatctgctcaaccttggcaggaagagatttttccacatctttcttaactcggcgtaacagaaatggctcaagctccttgtgaaggcttgcataaccatattctctccctttgccatgttcttcttcaaaatcttcccaggaagaaaacttttctggcataatgaaatgtagcaaagaccagagctctttgagggaattctgtagaggagttccagtgataaggagacgatgattggatttaaaatctattaaagttttatacagaagggagtcatcattctttaatcggtgtgcttcatcaacacctataaatgcccaatttaagaccttccagggaatgccttaaaataatagaaaaacagtattttgagagaaaaaccggaattcaaatttagcccttccatttaatctgactcaattattaaaatgaaatnnaaattaaaaaccaactttggcctaattttcaaataaaaaatcgn

SEQ ID NO: 554 - DNA, 548 bp, Homo sapiens
  misc_feature (1)...(548): n = A,T,C or G
acggaggactccattaataacatggaaatctccactctgaaagcgattcaccatttctgtcagcaagtcaggccatttctgtggaaaatcttctctgccaataatgctaattgcatcacttaactgcttctgaatttgctctgggctgctaagcatcaagtgcactatgttggctttaatggccactcgatcggcttcacaaattttgtttggttcatcttcaacaattctccagttccttttaatatagtttttgaatgttactgaagcacatactttgataacattatcctgggacttctccagtaatgtcaaaagcaacagtggataattctgatttccttcaacagattcaagaaatttctcagctggacgtcggatggcaggatcaggatcaagtgttttctttaaatattctgttagtgtttgcagatttgcatcgctgagttccattgctataggatctcgtggggatacagaaaccgaggaaggaaccccagccgcggaccgtaactngcactaccccgctacctngggcgcgaaacacg

SEQ ID NO: 555 - DNA, 576 bp, Homo sapiens
  misc_feature (1)...(576): n = A,T,C or G
actccctgcataacaagagattattttggagacagttgataaaaaccatacatcctttttattgttaagtcataaagaggtatcaaaattaaaagcaaaaattacagggtaagacttaacaaaactactaggagcgtcaaaggaagtgaaaatgggactaggcgcggggcaatatgaattaatgaacatgggaaggacaaggatggggagaacagtgagcatgtgctgaagatactaggggagaggatctggtgaaaaatttgatcttagacaagcgcctaggtaaagaaataatgggataagatttctaaaccccactatgtgcttaagagtcatcctcgccattggcgctgnctctgncatcctctccttctcacctctttttcatcatccttgatcaactccagcttggcatncccccgatcttcattatcattaatcttccagtangncccccttcttagcanaagtaatntgnaccccccttanaattcatttttccatttgnctaaattttttttccnggacnngtnggnntgggcccttttngnnntaaaanttttaantcttacnggg

SEQ ID NO: 556 - DNA, 613 bp, Homo sapiens
  misc_feature (1)...(613): n = A,T,C or G
ggtacctcttcccatgactgcacccagctccaggggcccttgggacagccagagctgggtggggacagtgataggcccaaggtcccctccacatcccagcagcccaagcttaatagccctccccctcaacctcaccattgtgaagcacctactatgtgctgggtgcctcccacacttgctggggctcacggggcctccaacccatttaatcaccatgggaaactgttgtgggcgctgcttccaggataaggagactgaggcttagagagaggaggcagccccctccacaccagtggcctcgtggttattagcaaggctgggtaatgtgaaggcccaagagcagagtctgggcctctgactctgagtccactgctccatttataaccccagcctgacctganacttgtcggaaaagctgtcttggggccttttatnaaataaaaagacttnagncnatgacaangganggtttaagaangggacttgnggggaantnggaagnnannaancccttggttggggtttaagnnnccccacgtttggcccaggcangtggctttttccttnttgggnccttnggtnncnttgngggacanaaggnnntttgnacccc

SEQ ID NO: 557 - DNA, 607 bp, Homo sapiens
  misc_feature (1)...(607): n = A,T,C or G
acctggatgaaaagcagagggaccccagaatcgaagcgagcaaagtgctgctgtgccatggggagctgcggagcaagagtggacataaactttacattttcctgtttcaagacatcttggttctgactcggcccgtcacacggaacgaacggcactcttaccaggtttaccggcagccaatcccagtccaagagctagtcctagaagacctgcaggatggagatgtgagaatgggaggctcctttcgaggagctttcagtaactcagagaaagctaaaaatatctttagaattcgcttccatgacccctctccagcccagtctcacactctgcaagccaatgacgtgttccacaagcagcagtggttcaactgtattcgagcggccattgcccccttccagtcggcaggcaagtccacctgaactgcagggcctggccggagctgtacgaaaaatgtgaaggggaaccaccctttgcgaggaactnacagcccaaaggaaggcattcacagtttcagtggtacttcaggtagaaagttgatgaaaacccttaccagantgtggcttttggcattgcaaatggcagaggccagcaagaacttaaannt

SEQ ID NO: 558 - DNA, 355 bp, Homo sapiens
  misc_feature (1)...(355): n = A,T,C or G
acaaagacaaagaaacaaactacattggcatttaagccaatcaaaaaaggaaagaagagaaatccctggtctgattcagaatcagataggagcagtgacgaaagtaattttgatgtccctccacgagaaacagagccacggagagcagcaacaaaaacaaaattcacaatggatttggattcagatgaagatttctcagattttgatgaaaaaactgatgatgaagattttgtcccatcagatgctagtccacctaagaccaaaacttccccaaaacttagtaacaaagaactgaaaccacagaaaagtgtcgtgtcagaccttgaagctgatgatgttaagggcagtgtacctn

SEQ ID NO: 559 - DNA, 597 bp, Homo sapiens
  misc_feature (1)...(597): n = A,T,C or G
acccgcaaaacgggacatagtatgtgacaatctgcatcgatcatggactactaaatgcctttacatagaagggctctgatttgcacaatttgttgaaaaatcacaaacccatagaaaagtaagtaggctaagttggggaggctcaaaccattaagggttaaaaatacatcttaaacattggaaagctcttctagctgaatctgaaatattaccccttgtctagaaaaaggggggcagtcagaacagctgttccccactccgtggttctcaaaatcataaaccatggctactcttgggaaccacccggccatgtggtcgccaagtagagcaagccccctttctcttcccaatcacgtggctgagtgtggatgacttttattttaggagaagggcgattaacactttttgacagtattttgntttgccctgatttgggggattgntttgtttttggtgggttgttttggaaaaacnggttataaactgggtttttgnangntttgggattttaaagcccnaaataaaaaannnnanaaaaaaaaagnctttggnctttgggccggaaacccttaangggcnaattccagccaccttggg

SEQ ID NO: 560 - DNA, 559 bp, Homo sapiens
  misc_feature (1)...(559): n = A,T,C or G
gactttgaggcaagtgtgggccactgtggtggcagtggaggtggggtgtttgggaggctgcgtgccagtcaagaagaaaaaggtttgcattctcacattgccaggatgataagttcctttccttttctttaaagaagttgaagtttaggaatcctttggtgccaactggtgtttgaaagtagggacctcagaggtttacctagagaacaggtggtttttaagggttatcttagatgtttcacaccggaaggtttttaaacactaaaatatataatttatagttaaggctaaaaagtatatttattgcagaggatgttcataaggccagtatgatttataaatgcaatctcccttgatttaaacacacagatcacacacacacacacacacacacaaaccntntgcctttgatgttacagattttantccgttnatttttaaggatagagcctttatnggtgnnnanaaaacaatctggantaaaaaaaacncnccnggccttgnatttngncttnntnggggtttccccaaanccattnnnnttgncaggctnggggng

SEQ ID NO: 561 - DNA, 569 bp, Homo sapiens
  misc_feature (1)...(569): n = A,T,C or G
ggtacaagcttttttttttttttttttttttttttttactttttgggananaggctaggaggaggaaggggtgaaaacagcgtctcactggagtctcaaaagtgtatgaatcttctggtagtgcaaggatgggataagatggccagggaagtcagatggaaaatccccaagattctttttgctactgatttctataattaaaatatgacatatgtaagggactagtgcatgatattcaataaatgtcagttgtctttcctaactaggttcctcacaggctaggttatgcctanatatcatcatcctcctttcagggaatgaagctcacctagaaaactagggaactaaaagtgcaatatggtttgggtaatgcagttggttagctgctccccatcctcccaactcactattccagggaggggctgaaaacagaaatggctcccctgaagctanntagcatggcatgcanagtcncatgaaaggtttgggctggaatttttaagccaagncctnttttttggaaaaaaatnttgggaaaaaancccnnccctnctgnttcnnagctgttt

SEQ ID NO: 562 - DNA, 597 bp, Homo sapiens
  misc_feature (1)...(597): n = A,T,C or G
cgaggtacggatgctacttgtccaatgatggtaaaagggtagcttactggttgtcctccgattcaggttagaatgaggaggtctgcggctaggagtcaataaagtgattggcttagtgggcgaaatattatgctttgttgtttggatatatggaggatggggattattgctaggatgaggatggatagtaatagggcaaggacgcctcctagtttgttagggacggatcggagaattgtgtaggcgaataggaaatatcattcgggcttgatgtggggaggggtgtttaaggggttggctagggtataattgtctgggtcgcctaggaggtctggtgagaatagtgttaatgtcattaaggagagaaggaagagaagtaagcccgagggccgtctttgattgtgtagtaaggggtggaaggtgattttatccggaatgggaagtgatnctaaggggggttgtttganncccttttcntgccntaaantggangtngaattccnnntnnggcncncatanattanaggccaaaatnaaattgaanggnnaaaaaancttnnangggggggactgntnnntgagaacccccctaaaatn

SEQ ID NO: 563 - DNA, 574 bp, Homo sapiens
  misc_feature (1)...(574): n = A,T,C or G
acgccaagaaccgtattctttgccacagggttttatgtgggacactttagacttgagtgatgccgaagtgctcaaggagttatacacgttgttaaatgagaattacgtagaagatgatgacaatatgttccgatttgactattcacccgagttcctgttgtgggctctgcgtccaccaggctggctcctgcagtggcactgtggggtcagagtgtcttcaaataaaaaactggtcgggttcataagtgccatcccagcaaacattcggatttatgacagtgtgaagaagatggtagaaatcaactttctttgtgttcataagaagttgagatcgaaacgggtagccccagtgctaatccgagagatcactagaagagtgaacctggaagggatcttccaggctgtgtcaaaaagcacactctccanncctcngggccctgcattcctgcgcttntntnnagacactttccctttctattttactgnggtgactttttcaaacgctgtnaccccaacccttanantttttngcccttggcggnntatnggttaaanatcacccttcccngggttt

SEQ ID NO: 564 - DNA, 600 bp, Homo sapiens
  misc_feature (1)...(600): n = A,T,C or G
ggtacagaatatttctaataaacctaaatttaatcacagttaaaatttctcaaaagtattttcaagtgctcaagaatattaaagtttggggggaaatacctaagtcataaataagcaagtattccctccaagattcactaattgggataaaagtctcagggtaagcccacaagaatggtctgcaataaagaaaaatcaggtctgtgtagagtaatttctgccatctttagcagaaaagccaaaaacattctgagccaaataaaagcaaagatcttttgattcagcgccttttgttgtgttagttttaatttctaacttctcaacatgttatagctcagaaattcccatatgcttactatctgtaataaggaactataacgttaaagaaaaaattcagagaccgtgatcattttccatcataggtctggctctctttggtagaaacagatcaagacttactttatttttctcttccccnccngaagaaaanggggggtttaatggcntttacccttgnnaaanaacccncgngggtttaaccttnaaattnggnggggtaaaanancctaangntnagccctttttnanaactnggggnaa

SEQ ID NO: 565 - DNA, 600 bp, Homo sapiens
  misc_feature (1)...(600): n = A,T,C or G
accatcggccatgtggaccacgggaagaccacactgactgcagccatcacgaagattctagctgagggaggtggggctaagttcaagaagtaccaggctgtttgtgatcgtatcagccgctatgtgaaacagcctttacctgatgagtttggcagctcacccttggagccaggggcctgcaatggctccaggaacagctgtgaaggagaagatgaggaagaaatggagcatcaggaagaaggcaaagagcagntttnanaaacagaaggcagnggggaagatgagccaggaaatgaccccagtgagaccacccaaaagaagatcaaaggccagccctgcccaaaaaggcttntttaccntcagtcttgtgaactcctatggaacagctgacataaatttcactttgcagctnatggaaaactacntaaactcaantnttcganctacacttggncntggatttgtgacntttgaaaactntggaganttttnctatgnntgtgcncnnaaatttntagggnttntccnataaatctctgttancctttttgggnaccntttcnaagnaagatntnangnccctanggnccnttnaaaaan

SEQ ID NO: 566 - DNA, 576 bp, Homo sapiens
  misc_feature (1)...(576): n = A,T,C or G
ggtactgaacaggtaagtcatccctcagccagagattagtctacttcttccatgcgtgatgtgtcgtcatctccttcaagggtgtttttctttatttttgttaatattaaaaagtctgtatggcatgacaactactttaaggggaagataagatttctgtctactaagtgatgctgtgataccttaggcactaaagcagagctagtaatgctttttgagtttcatgttggtttattttcacagattggggtaacgtgcactgtaagacgtatgtaacatgatgttaactttgtggtctaaagtgtttagctgtcaagccggatgcctaagtagaccaaatcttgttattgaagtgttctgagctgtatcttgatgtttagaaaagtattcgttacatcttgtagggatctactttttgaactttttcattccctgnaggtgacaantctgcatggacctgccccgggcggcccttnaaanggcgaanttcannncantggngggcnntcttngggnnccnncctggnccaaatntgggggancngggncaanctnttccntggggaaatggntccc

SEQ ID NO: 567 - DNA, 427 bp, Homo sapiens
ttttggcagtaaatcaattttatttgtgttcacagaacatactaggcgatctcgacagtcgctccgtgacagcccaccaacccccaaccctctacctcgcagccaccctaaaggcgacttcaagaagatggaaggatctcacggatctcattcctaatggtccgccgaagtctcacacagtagacagacggagttgagatgctggaggatgcagtcacctcctaaacttacgacccaccaccagacttcatcccagccgggacgtcctcccccacccgagtcctccccatttcttctcctactttgccgcagttccaggtgtcctgcttccaccagtcccacaaagctcaataaataccaagagacctgcatttacagcagggggaacatctcacacccttgcataagttaaaataaatattaccgt

SEQ ID NO: 568 - DNA, 616 bp, Homo sapiens
  misc_feature (1)...(616): n = A,T,C or G
acaagagtgatggcaatgtgactggaacagaaatagtttctaccaggcacacaaaagctcctgtaagccccgtagttccgtcctgcaaagggcctcagtgggaaccaggtctgcagacccgagtgggcagagagacgggtggaagcaggtgccccagatggtcccgcaggcgtcaccgtctggtttggagaccttaagggagttgtgcttcaaacttctctcccagggtctcaggtggagactagggagtttgacctaaaggtcctccaaggagaggccaaggtcttggagacagatctggtttaccatcttttaacaaaaggcaaatgtcttctcttcttcagaaagagtcattaacactaaaattcttttcttnngaagtttcttcttttccgatgccatcttccaagtttgnncccaagaatgaaaggcgtcttttnccnaagggtcaagggtttccattcacnttgggccccattgnaaaagggactggttccttttggggggttgggncccggaccccccaaanaaggnaanggnttttgtncccaagcctttnttcccnggggngggaagggnaanaacctttgggcccgngnaacccaccttaangggg

SEQ ID NO: 569 - DNA, 582 bp, Homo sapiens
  misc_feature (1)...(582): n = A,T,C or G
acagaatataacgcagcttggcaggatgcatacggccctgcgcaggggaaagtatttcaaatcagctggcaggttcaagcctttctgcactgtagactttccacactctggaaaagaagcaaacaaacaaaccccaaagaacccccgaaaaaaacaaaaaccatccgggaggtgcatgagtccaatgggaatgcaaccgtgatgccgctgtcctatgcccagtgacagcacaggtcacgtaagttacagcaggggaggggtagctcaagctacagaggattattgtcatattgctaagacagcataaatccattcaaaaaaaaaaaaaaaaatccaaaccagggtaagtaaagaaaggaaaaccaaatctatacagcatttacaacaaataaatctctagccagctgggggtaaaatatgcatctatgtatagactatgtgtagggtaagaaaagcttttaatatnggttanaaagaggncctttgattaaaggccttggcccgaacncccttaaggnnnaattcnagncnattgggggccggtcnaaggggatccaacntgggnccaaanttggngaatnn

SEQ ID NO: 570 - DNA, 557 bp, Homo sapiens
  misc_feature (1)...(557): n = A,T,C or G
ccgggcaggtacttcttgcctttaagataggcaccaggaaatctttcaaggatctcatagtcactctccaatttatagagggctgacaatctggcttccattaaaatgagtaatcgtcctctggcaacatctttaattttcacatattgcatttctggattaacacacacagcaaggttactaggtagagtccagggagtggttgtccaagcaactaaagatacagtttcatcttcttccaaagggaaagttacaaatactgaaggatcttgaacatccttataattctggtgtgactcgaagttggaaagtggagtgttacatgccgtagagaagggcatgactttcacacctctataaacaaggcctttatcatagagttggttgaagacccaccagactgattccatgaattgtggatacagagttttatagtcattggcaaagtnaatncatcggcaagttgctacaggagacttcactnannnaaatctcatcncaatnnntggactnatggatacctngganncccntttngcccaatctgggcctngatn

SEQ ID NO: 571 - DNA, 382 bp, Homo sapiens
acactgctctcttcctggcaattgacagtggtaaccctcccgctacgggcactgggactttgctgataaccctggaggacgtgaatgacaatgccccgttcatttaccccacagtagctgaagtctgtgatgatgccaaaaacctcagtgtagtcattttgggagcatcagataaggatcttcacccgaatacagatcctttcaaatttgaaatccacaaacaagctgttcctgataaagtctggaagatctccaagatcaacaatacacacgccctggtaagccttcttcaaaatctgaacaaagcaaactacaacctgcccatcatggtgacagattcagggaaaccacccatgacgaatatcacagatctcagggtacc

SEQ ID NO: 572 - DNA, 621 bp, Homo sapiens
  misc_feature (1)...(621): n = A,T,C or G
acaagctttttttttttttttttttttttttttttttgccatttattgccatgttttaaaattcgtgcaaaatatntgaagccctggacagagaatacaaagtgatattttcccaagaaacntaaaactaggaaaaggggtgggggacattttcccaccanagctncccccacgccaggccccaagcagggtgaggcctncaacccggccagctgagcagggaggactaagagctacaatctggaccanggaaggaggggtggaatttgcaacagngtnttaactaccaacgagaggaaagccagtcaactgtacaacctcttgcggagcggggaaggtgactaccngaacaagacatgctgcctgccctgtgcttgtgggctgcaaagtgggnntccaataagtggttccatgaacgaggacaggagtttttganccttgnggatcaacaaaangttnactgacatccntttctgcctttccctttcctggnncttttaanccatgtcaacnntgacanacncctntngatggtccctttggnagtcctaatnaggctgatttttggannantnaatntttttttggaacncaaggngaacntttttggngaattttngg

SEQ ID NO: 573 - DNA, 296 bp, Homo sapiens
  misc_feature (1)...(296): n = A,T,C or G
ggtactcattgtgctctttggtgcctttcctttcctacagaaaaggaagtgatctataccaaggtttgcagggaagtcaaatgttctcaacctttcatgccctctggttactcatctggcttgcaaaataatttggatccggacagatttccagtattttcaagtccgctgctttcccgcaaagctcggcctaacctggagctagttaggtccgcaggcgccaccgncggcgcactccggagaagaagctccttcttcagccgcccaggagagttcctcgagaaagatgccgccgc

SEQ ID NO: 574 - DNA, 616 bp, Homo sapiens
  misc_feature (1)...(616): n = A,T,C or G
ggtactccaacgccaccctgtgcagaaatgagagaagacagtgctagagtctatgaaaacgtgggcctgatgcaacagcagaaaagtttcagatgagaaaacctgccaaaacttcagcacagaaatagatgtggactttcaccctctccctaaaaagatcaagaacagacgcaagaaagtttatgtgaagacagaatttggatttggaaggcttgcaatgtggttgactaccttttgataagcaaaatttgaaaccatttaaagaccactgtattttaactcaacaatacctgcttcccaattactcatttcctcagataagaagaaatcatctctacaatgtagacaacattatattttataggaatttgtttgaaattgaggaagcagttaaattgtgcgctgtattttgcagattatggggattcaaattctagtaataggcttttttattttatttttatacccttaaccaggttaatttttttttttcctcattggtnggggatgatgagaagaaatgattngggaaaattaagtaccaacgnactagaaaagtgagaaccattctatttcccntntggttccnggagnggataattcatttganggcttn

SEQ ID NO: 575 - DNA, 614 bp, Homo sapiens
  misc_feature (1)...(614): n = A,T,C or G
ggtacaaacattttacaaaaaagaacattaccaatatcagtggcagtaagggcaagctgaagaataaatagactgagtttccgggcaatgtctgtcctcaaagacatccaaactgcgttcaggcagctgaaacaggcttctttcccagtgacaagcatatgtggtcagtaatacaaacgatggtaaatgaggctactacataggcccagttaacaaactcctcttctcctcgggtaggccatgatacaagtggaactcatcaaataatttaaacccaaggcgataacaacgctatttcccatctaaactcatttaagccttcacaatgtcgcaatggattcaagttacttgcaaacgatcccgggttgtcatacagatacttgntttttacacataacgctatgccatcccttncttcactgcccagtcaggtttcctgntgttggaccgaaaggggatccttttaaaaatgcttcnttcaagacagaagtgagaaagaaaggagaccctgaggccaganctattaaaacttgtgngtccccaaaaggaaggggaaaggnagaattgaaaggaaacggntctttngcccaggatnggaancgggactacnttgg

SEQ ID NO: 576 - DNA, 596 bp, Homo sapiens
  misc_feature (1)...(596): n = A,T,C or G
acatcaagacttttggaacagcgatcgtaatcaatcctgagaaagacaaagacatggtccaagacctgttggacttcaaggacaaggtggaccacgtgatcgaggtctgcttccagaagaatgagcggttcgtcaacctgatgaaggagtcctttgagacgttcatcaacaagagacccaacaagcctgcagaactgatcgcaaagcatgtggattcaaagttaagagcaggcaacaaagaagccacagacgaggagctggagcggacgttggacaagatcatgatcctgttcaggtttatccacggtaaagatgtctttgaagcattttataaaaaagatttggcaaaaagactccttgttgggaaaagtgcctcagtcgatgctgaaaagtctatgttgtcaaagctcaagcatgagtgcggtgcagccttcaccagcaagctggaaggntgttcaaggacatggagctttcaangacatcatggtcatttcaagccagcntatgcagnatcngagtgcttcaggcctatagacctacagggacatctnccatggcttctngccacataacnccatggaangccttaccccaaa

SEQ ID NO: 577 - DNA, 617 bp, Homo sapiens
  misc_feature (1)...(617): n = A,T,C or G
ggtaccacaactcccaggattttcctggatcaaaccttgtatctcttctgcaagtattgtgtatattggtctgagagacgtggaccctcctgaacattttattttaaagaactatgatatccagtatttttccatgagagatattgatcgacttggtatccagaaggtcatggaacgaacatttgatctgctgattggcaagagacaaagaccaatccatttgagttttgatattgatgcatttgaccctacactggctccagccacaggaactcctgttgtcgggggactaacctatcgagaaggcatgtatattgctgaggaaatacacaatacaggggttgctatcagcactggatcttgttgaagtcaatcctcagttggccacctcagaggaagaggcgaagactacagctaacctggcagtagatgtgattgcttcaagcttttggtcagaccagaagaangaaggcatattggctatgaccaactttctactcccagttcaccagatgaatcagaaaatcaagcncctgtganaaattaggagacacttngccctggcatgtttacaaaaaggctttnngaaatntgangcctttaggggaaaaaataaa

SEQ ID NO: 578 - DNA, 409 bp, Homo sapiens
ggtacatgcagaattgtcaactacagggaatgaaaagttcaaaaagtagatcctacaagatgtaacgaatacttttctaaacatcaagatacagctcagaacacttcaataacaagatttggtctacttaggcatccggcttgacagctaaacactttagaccacaaagttaacatcatgttacatacgtcttacagtgcacgttaccccaatctgtgaaaataaaccaacatgaaactcaaaaagcattactagctctgctttagtgcctaaggtatcacagcatcacttagtagacagaaatcttatcttccccttaaagtagttgtcatgccatacagactttttaatattaacaaaaataaagaaaaacatccttgaaaatatattatcagaggaattgtagagt

SEQ ID NO: 579 - DNA, 619 bp, Homo sapiens
  misc_feature (1)...(619): n = A,T,C or G
ggtactattttatatccagaaagtcttctctatgtagagaagtcagagagactagatgctttcactagggaatgtcttcccacccagccatcacaaatgtggacaatcactgcatccacatctgtaggcatatttctatggaagtttaattgacagctatattcattatttattttacaatttcatttttctacacctttgagatttatgaatgcagttttttcttaaaatttattttaacttgacagtatgtttttagttcccccaatttaattaatggaccatgtgcatatatatgggagtgtgcttacatgttaataatttacttgcatacttatgagaatttcacattggaattcataatggtaaaacaacatacatctgccaatatacgttttttctgntggtttaagagaagataactgacagctttacctacttcctacagatgcatctaaacccagatttactgagaagaagtgtattggactctgagtggaaaaagagtatggtgttttttggttttaagntctgctctaganccataattngnaaaaaattttaggncttaanctggtnccctaaaattggnnanccaaangttnaatgaaanggctgc

SEQ ID NO: 580 - DNA, 632 bp, Homo sapiens
  misc_feature (1)...(632): n = A,T,C or G
ggtacaaacattttacaaaaaagaacattaccaatatcagtggtagtaagggcaagctgaagaataaatagactgagtttccgggcaatgtctgtcctcaaagacatccaaactgcgttcaggcagctgaaacaggcttctttcccagtgacaagcatatgtggtcagtaatacaaacgatggtaaatgaggctactacataggcccagttaacaaactcctcttctcctcgggtaggccatgatacaagtggaactcatataacaacgctatttcccatctaaactcatttaagccttcacaatgtcgcaatggattcagttacttgcaaacgatcccgggttgtcatacagatacttgntttttacacataacgctgtgccatcccttccttcactgncccagtcaggtttcctgttggtggaccgaaaggggatcattttaagaaatgcttccttnaagacagaaagtgagaaagaaaaggagacccttgaggncaggaactaattaaacctggtgtggtgccccaaaagggaagggggaaaggccggaanttgnaanggataaccgnttcntttngcccagggantcnggaaccgtggctcgctttgggcttggacanncccaaatcc

SEQ ID NO: 581 - DNA, 607 bp, Homo sapiens
  misc_feature (1)...(607): n = A,T,C or G
acataagtgatggagtatcaatgctggtggttgaggtggagaaggaatttagttccttgaattttctttgttctcctctgtgttccttcttggccaggtaacccctgctatatcataagatttcatctgcgagaaaaggaggaattcttctacagctcccctgctcaactttcaggagattttgacccatgtgctgttaatcaccgaaattttttaaggaggcttctcctggcatgaaagagttggtattgtgtcccgaattggttggttcttggtctcactgacttcaaaaatgaagccgcggaccctcgcggtgagtgttaacagctcttaaggtggcacgtctggagtttgttccttctgatgttccggatgtgttcagagtttcttccttctggtaggttcctggcctcgcttggcttcaggaatgaagctgcagaccttctcggtnagtgntacaagctcttaangcaggccgtctggaagttgttcgttcctcctggggctcgtggtcttgctggctttaggagtcaagtncaaaccttnagggtgagtgtacantcatanaagcagtgtngncccaanaatnancnttnaaaagccaacn

SEQ ID NO: 582 - DNA, 603 bp, Homo sapiens
  misc_feature (1)...(603): n = A,T,C or G
actgtattctccatatgtagctcggatgcggagggctgtgagattccgcagtaaccttcgatactcaaagtaactcagctgggggctccaattattgcttggatgctcatttaacctgaatgtgtaagtcttggtgagcccacaaggcagtgtcttgccaagtggcatcaagggagctgtgatccgtagaccagcaccttccagaatcacatcatgggcagatgggtgtctgcctcctctgtccacacggtagtcaaaggacaggctttgaccatagctcacctgttgattcccaagaaatttggcaggagccacaaaatagacagggtctagtcgttgggctgagctaaacacatcttgatgggcgctgtgaccattggagctttgcaggagacccatttcgttggacagccttccagccatcaacatcttgatgaaaggtanaagtgatcttatggacactgnattctgcanaactgcggcaacttggctgaatgccatagcagaaccctgggtaccttnggccggaacacgcttanggcgaattcagcccacttggggccgtctannggnanccactttgggcccancttggggaanant

SEQ ID NO: 583 - DNA, 535 bp, Homo sapiens
  misc_feature (1)...(535): n = A,T,C or G
ggtacacacaggaccgcctggggctaaaggaaatggacaatgcaggacagctagtgtttctggctacagaaggggaccatcttcagttgtctgaagaatggttttatgcccacatcataccattccttggatgaaacccgtatagttcacaatagagctcagggagcccctaactcttccaaaccacatgggagacagtttccttcatgcccaagcctgagctcagatccagcttgcaactaatccttctatcatctaacatgccctacttggaaagatctaagatctgaatcttatcctttgccatcttctgttaccatatggtgttgaatgcaagtttaattaccatggagattgttttacaaacttttgatgtggtcaagttcagttttagaaaagggagtctgttccagatcaagggccagaactgtgcccaggcccaaaggagacactaactaaagtagtgagatagattctaanggcaaacattttccaggcttgccatatttcaagcaanaagggccnaagcctgagg

SEQ ID NO: 584 - DNA, 524 bp, Homo sapiens
  misc_feature (1)...(524): n = A,T,C or G
acaactctcttaaaagagtatggataactatattttctggattctggaggttgataaccatatgcacttaacattatattctataaacattaagtagtgccagttatgagattcccagttcttactaaattgtattagcaggagctggtaattacttgtattatcacatgtaactaataatttgaactatacttgaaggaccgtgttgatgtcaggtatttacagtggttggaagatagcagtattattagcataagctgcatacgtaatattcagtaactgccatattatataacaaatttacattcgcaaattcagtatcctgttaaagtgtcatattcttgtaatctgcattctccaggagttttatgtgtttaatagatgaatttattttatttntaaaggtattcaaatgntttcagccncntataggagaaatacccaagtatattctagttccttnatgtccctgnaccctcggccgngaccacgctaaagggcgaaatncaancncactggnnggn

SEQ ID NO: 585 - DNA, 618 bp, Homo sapiens
  misc_feature (1)...(618): n = A,T,C or G
actgactataatcaaactccgaataccattaaaattaagctatgcagtcggaacgtgggtgataacgtccacgctcgcgaggggaacaacccagatcgtcagctaaggtcccaaaattgtgttaagtgagaaaggttgtgagatttcataaacaactaggaagttggcttagaagcagccaccttttaaagagtgcgtaattgctcactagtcaagagatcttgcgccaataatgtaacgggactcaaacacaataccgaagctacgggcacattatgtgcgttaggagagcgttttaatttcgttgaagtcagaccgtgaggactggtggagagattaaaagtgagaatgccggcatgagtaacgattcgaagtgagaatcttcgacgcctattgggaaaggtttcctgggcaaggttcgtccacccaggggttagtcagggcctangatgaggcanaaatgcatagtcgatggacacaggttaatattcctgtaccttcggncgngaacacgctaagggccgaattncagcacacttggcgggnggtcctagtnggatcccanctntgganccaacttnggggtaatcntgggcttanctggttccctggtgaaat

SEQ ID NO: 586 - DNA, 337 bp, Homo sapiens
acaagctttttttttttttttttttttttttgtttcaagttttaatcaaagcttgtatataagattactttattcctgcatcttctcaatggtttcttccttgtatttgcccttttcctttcctacttggcgagatttggctttccgttcgaggatctttttgcggtctttgtccagttttagcctagtgataaccaccttgctggggtgaatgcctacgtggacagttgtgccattagccttttcccgctgcacccgttcaatgtagataacatatttcttcctgtaaacctggactactttgccaatttgctgacctttatagtgtccacgtacc

SEQ ID NO: 587 - DNA, 656 bp, Homo sapiens
  misc_feature (1)...(656): n = A,T,C or G
cgaggtacaagcttttttttttttttttttttttttttctgaggagtggcatggagttctttaatttggaaggcaaaaggttacatttaatgaaaggcagaggctggattaataaatgtttgttanaaagttgttctgacacacagtgaactctgggcttttctcctgcataaaaagcagagctagcagtaagtgcaaatntgaagaaaatccatgtgtccaataagctgccatctccanaactcttatccaggaaattcaaagagtgaacattcttttagtctcctactcctcaattaagtaaatgagaatgattcagccaacaaagttcatgacaacaaggtgcaggatggtgctggcaaanagaaaatnagcaaaggctcgctctggggagatgccttggaaatccnntttgntctgngggttgatctgnattcttcagggnaaacccgctagggatgaaacttcccacccnaaganaatgaaaccccgaaagaaaaagangtttaaaggggaaaggncccccnganggagaccagttacccgaacttggaacnnccccggcaagcaattttttcncggcagggtnccctggcccngggcggccntttnaaaagggggcaattnccangncacttgggggggcgttttttnng

SEQ ID NO: 588 - DNA, 586 bp, Homo sapiens
  misc_feature (1)...(586): n = A,T,C or G
actcaaacacaggggggttgtcatttatgtcaagaactgatacaatcacagtgccagtggcagtcagcctccttggcaagccttgatccacagctttcaaagagagggtgtatactgcctggagttctctgtccaaaggtttttctaactgaataattccagataattcgttaatggagaactgcccatcagcagagtcaatcagtgagtataaaatcttccgatttaatcctgcgtcggcatctgtggcctgcactcttgtcagcagcgttcccggctctgtgttttcaaacacggtgatggcataaggatcggcagagaattcgggggcattatcgttcacgtcttctagcgtgagcacaatactggcttggtagaatcttcctcctccatctgtggccctgacgagaagatgataaacagcttgctcctnacgatcaaaggggggttgacgttttcaagtcacctggnctggattaatttgaattttctgcacctgacccaatacggtaagtattcagcgtaaccggatgttgcgttgacanaaactgatgacattttccgaaggactnttaggaaaaggtga

SEQ ID NO: 589 - DNA, 645 bp, Homo sapiens
  misc_feature (1)...(645): n = A,T,C or G
acaagcagtattagaaaatctttttggcaagggagagaaataaatacaaatggaatgctacatttttaaattagcaaactgtctcaggaatgataaaggtatcagtaaagtagcaaggggataactttaaaacattatttgtctggggctcaaaaaacactcaaaacaatttatttaaaggttgcacaagagctatgtccaggcatttacgcttatgggaagtaaaattaaaagaggatacttttttcccaaggagaatttctttaaaaccaagcacattgctaaatagcaacattatactcggtaaacaataattggcaacaaaataagtttaatattctgcccaaaccagtcccagatactgtttaataaccaagatacaaactaattttgttgnaacaagcctagaccaattttatcaaacatgtccttggttagatatccaatttcatttaacgtttttgnaagctcanttgacagccagtcnagtccttnatacngacccagttccntggggttggcacaaagtgggnttggaccatacccaccattcaaaaaggcgcatntnggttcttggcccaaaaaatccnggnaaaaaaaagggangggaaattattnaagggncccttgggnggnaatgggcnc

SEQ ID NO: 590 - DNA, 464 bp, Homo sapiens
ggttcttgacgaggctgcggtgtctgctgctattctccgagcttcgcaatgccgcctaaggacgacaagaagaagaaggacgctggaaagtcggccaagaaagacaaagacccagtgaacaaatccgggggcaaggccaaaaagaagaagtggtccaaaggcaaagttcgggacaagctcaataacttagtcttgtttgacaaagctacctatgataaactctgtaaggaagttcccaactataaacttataaccccagctgtggtctctgagagactgaagattcgaggctccctggccagggcagcccttcaggagctccttagtaaaggacttatcaaactggtttcaaagcacagagctcaagtaatttacaccagaaataccaagggtggagatgctccagctgctggtgaagatgcatgaataggtccaccagcttgtacctgccgggcggccgttcg

SEQ ID NO: 591 - DNA, 387 bp, Homo sapiens
  misc_feature (1)...(387): n = A,T,C or G
ggaagacggaggtcctctttccttgcctaacgcagccatggctcgtggtcccaagaagcatctgaagcgggtggcagctccaaagcattggatgctggataaattgaccggtgtgtttgctcctcgtccatccaccggtccccacaagttgagagagtgtctccccctcatcattttcctgaggaacagacttaagtatgccctgacaggagatgaagtaaagaagatttgcatgcagcggttcattaaaatcgatggcaaggtccgaactgatataacctaccctgctggattcatggatgtcatcagcattgacaagacgggagagaatttccgtctgatctatgacaccaagggtcgctttgctgtacctnggccgcgacacgc

SEQ ID NO: 592 - DNA, 648 bp, Homo sapiens
  misc_feature (1)...(648): n = A,T,C or G
ggtacaaacattttacaaaaaagaacattaccaatatcagtggtagtaagggcaagctgaagaataaatagactgagtttccgggcaatgtctgtcctcaaagacatccaaactgcgttcaggcagctgaaacaggcttctttcccagtgacaagcatatgtggtcagtaatacaaacgatggtaaatgaggctactacataggcccagttaacaaactcctcttctcctcgggtaggccatgatacaagtggaactcatcaaataatttaaacccaaggcgataacaacgctatttcccatctaaactcatttaagccttcacaatgtcgcaatggattcagttacttgcaaacgatcccgggttgtcatacagatacttgntttttacacataacgctgtgccatcccttccttcactgncccagtcaggtttcctgttgntggaccgaaaggggatacattttangaaaatgctttcttcaagacagaaatgagaaagaaanggagaaccctgaggccaggaatctattaaaccctgggggtngnncnccaaaagggaagggggnaaaggccnggaatttgaaaaggntaaaaccgnttccttttgngncccagggaattagggaaaccttgactnacntttggg

SEQ ID NO: 593 - DNA, 625 bp, Homo sapiens
  misc_feature (1)...(625): n = A,T,C or G
ggtacttaaaatcagagtcaaaaaatggttttaagttttaatactcttaattagctccctgctttatactgtaactccacagaagacatagggccacctaggattcacaggaaggagcagctctgattcttacatggctggctccgatgcccccacagcaggcctcttcctccccaagtttttcctctccatttcaaaaaagcactattttatcttcacatccaagagctggttggtttggtttgtttctttggaaaccaataaaagaagcaattttttcctgttctttttactcacatctacctatcagagcggctatttccttcgacagttcagtagcacacaggctgacttggccacatggactcatgaatgcatgcattcagaccgcatattgctaccaaatgggaatgtgggaatatgctatgcacctcaggttgagaaatgaccaagaaaatcaagatctaaaggggtgatatataatatatatatatatcaatgctattattcataaaaaccttggttagtaataaaaaaaattgctttggttnaaatattgaatattataagctggcttctcatgggttggaaaaaataagtctttntgnaaaagccggggcctttt

SEQ ID NO: 594 - DNA, 586 bp, Homo sapiens
  misc_feature (1)...(586): n = A,T,C or G
ggtacccagacaaaacccggccacgtgtaagtcagatgctgattttgactccatttcaaggtcaaggccatggtgctcaacttcttgaaacagttcatagatactacactgaatttcctacagttcttgatattacagcggaagatccatccaaaagctatgtgaaattacgagactttgtgcttgtgaagctttgtcaagatttgccctgtttttcccgggaaaaattaatgcaaggattcaatgaagatatggcgatagaggcacaacagaagttcaaaataaataagcaacacgctagaagggtttatgaaattcttcgactactggtaactgacatgagtgatgccgaacaatacagaagctacagactggatattaaaagaagactaattagcccatataagaaaaagcagagagatcttgctaagatgagaaaatgtctcagaccagaagaactgacaaaccagatgaaccaaatagaaataagcatgcaacatgaacagcttggaananaagttttcanggnctagtggaagaataccccggcgtggtattgaacnacttgctcaagagttaagaattt

SEQ ID NO: 595 - DNA, 613 bp, Homo sapiens
  misc_feature (1)...(613): n = A,T,C or G
acagaaggttgacgaaaattcttactgagcaagaaataaccttgttgtaattactaaaatttgagaaatgtgattcttgactggaaaaatagatgtgtcgtggaggccgaatgtttgcaccaaccaaaacctggcgccgttggcatcgtagagtgaacacaacccaaaaacgatacgccatctgttctgccctggctgcctcagccctaccagcactggtcatgtctaaaggtcatcgtattgaggaagttcctgaacttcctttggtagttgaagataaagttgaaggctacaagaagaccaaggaagctgttttgctccttaagaaacttaaagcctggaatgatatcaaaaaggtctatgcctctcagcgaatgagagctggcaaaggcanaatgagaaaccgtcgccgtatccagcgcaggggcccgtgctcatctataatgaggatnaatggtatcatcaaggcctttagaaacatcctggaaatacctctgcttaatggtaagccaagcttgaccattttgaanncctgttctggtgggccttttgggacgttctggatttggacttgaaaggcttttccggaattnnatgaaatgnccnncggccc

SEQ ID NO: 596 - DNA, 616 bp, Homo sapiens
  misc_feature (1)...(616): n = A,T,C or G
gcgtgggtcgcggccgaggtacaagaacactccttgggcgtccttgctgttttgtttgtgaagttttctatgcccagtgttcctgacttcgaaacgctattctcacaggttcagctcttcatcagcacttgtaatggggagcacattcgatatgcaacagacacttttgctgggctttgccatcagctaacaaatgcacttgtggaaagaaaacagcccctgcgaggaattggcatccttaagcaagccatagacaagatgcagatgaatacaaaccagctgacctcaatacatgctgatctctgccagctttgtttgctagcaaaatgctttaagcctgccttccatatcttgacgtggatatgatggatatctgtaaagagaatggagcctatgatgcaaaacactttttatgntactattattatggagggatgattatactgggctgaaagaactttgaaagactctctacttttatgaacaggctatactacttctgcatggcggcagtcatatcatgtgggaacatttaaaagnntatttannggcttgaatacctggcaaagacctgnccggcgccgttcaaaggggaattcaccacttggnggcgtnt

SEQ ID NO: 597 - DNA, 631 bp, Homo sapiens
  misc_feature (1)...(631): n = A,T,C or G
accagatggcttttcagacagaggttggaaaccatcccacttttgaggatatgcaggttctcgtgtctagggaaaaacagagacccaagttcccagaagcctggaaagaaaatagcctggcagtgaggtcactcaaggagacaatcgaagactgttgggaccaggatgcagaggctcggcttactgcacagtgtgctgaggaaaggatggctgaacttatgatgatttgggaaagaaacaaatctgtgagcccaacagtcaatccaatgtctactgctatgcagaatgaacgcaacctgtcacataataggcgtgtgccaaaaattggtccttatccagattattcttcctcctcatacattgaagactctatccatcatactgacagcatcgtgaagaatatttcctctgagcattctatgtccagcacacctttgactatagggggaaaaaaacccgaaattcaattactatgaaccgacagcaaggcacaaagctcgaatncccaagcccttgaaacaagtggtaaccagcttttcaccacancaccaaccnncaaacnccccaggganttacgcccaaggtaccttnggccgggaacccncttanggggnaattcncgncccttggg

SEQ ID NO: 598 - DNA, 630 bp, Homo sapiens
  misc_feature (1)...(630): n = A,T,C or G
cgaggtgcttcgtcttcggtttttctcttccttcgctaacgcctcccggctctcgtcagcctcccgccggccgtctccttaacaccgaacaccatgccttcaattaagttgcagagttctgatggagagatatttgaagttgatgtggaaattgccaaacaatctgtgactattaagaccatgttggaagatttgggaatggatgatgaaggagatgatgacccagttcctcctcctcctcctcctgaagatgatgagaacaaagaaaagcgaacagatgatatccctgtttgggaccaagaattcctgaaagttgaccaaggaacactttttgaactcattctggctgcaaactacttagacatcaaaggtttgcttgatgttacatgcaagactgttgccaatatgatcaaggggaaaactcctgaggagattcgcaagaccttcaatatcaaaaatgactttccctctttttttgtaagcaatggctggctaagttaatgggccaggtaacntttagtgaccttttaaaaagtttggccattggnaaatnaaaccacttgcaaaaaagttttntggaatagaatttccnaatattttcctttttcatgagtgggaactgggnaaagg

SEQ ID NO: 599 - DNA, 359 bp, Homo sapiens
ggtacctacctcaggagcagagatttgatattcgagtgctgggcttaggtctgctgataaatctagtggagtatagtgctcggaatcggcactgtcttgtcaacatggaaacatcgtgctcttttgattcttccatctgtagtggagaaggggatgatagtttaaggataggtggacaagttcatgctgtccaggctttagtgcagctattccttgagcgagagcgggcagcccagctagcagaaagtaaaacagatgagttgatcaaagatgctcccaccactcagcatgataagagtggagagtggcaagaaacaagtggagaaatacagtgggtgtcaactgaaaagactgatggt

SEQ ID NO: 600 - DNA, 589 bp, Homo sapiens
  misc_feature (1)...(589): n = A,T,C or G
acccagggacacaaacactgtggaaggctgcagggacctctgcctaggaaagccaggtattgtccaaggtttctccccatgtgacagtctgaaatatggcctcgtaggaagggaaagacctgaccgtcccccagcccgacacccataaagggtctttgctgaggaggattagtaaaagaggaaggcctctttgcagttgagataagaggaaggcatctgtctcctgctcgtccctgggcaatggaatgtctcggtttaaaacccgattgtatattctatctactgagataggagaaaactgccttagggctggagatgagacatgctggtggcaatactgctctttaatgcattgagatgtttatgtatgtgcacaaaaaagcacagcgcctttttctttacctcgtttatgatgcagagacatttgttcacatgttttcctgctgactctctcccactattaccctattgcctgccacatctccttttcgaaanggtagagataatgatcaataaatactgagggactnaganactgggccgcgtaagtcctaatatctgaacgccagtccctggcccanttttttnt

SEQ ID NO: 601 - DNA, 240 bp, Homo sapiens; identical to SEQ ID NO: 501

SEQ ID NO: 602 - DNA, 621 bp, Homo sapiens
  misc_feature (1)...(621): n = A,T,C or G
ggtaccttttacatacaagaaattaaatgagagaaaaaataactgtagttacaccatatcacttacaagaatggagaatctgcttataagtcaaactagaattagaacttatttcttagactgcttcataaaaactaacataccactactttttaattatttatttatttgctaaagaacaaaaatttaagtatgaaaaacaaccaactgattcacccaactcagtaagtttgactcacgttttctggttcaacaccaatgtcttcacaaaatttctccatgccttcagggcctacaacatcatcagttcctgcatattcatagaaccattccaagcaccttttacttgaaaaggcttcttcttcagtctttattctagtcgaatcatattttctatacatgctatcatgtctacttttcttggcagataaatcatctccagaagcaggtcttctctttttccttggtggcatcactttattaaagcagtctgaagaactgnaagaaccgagacttcttggtttggcgacgncttggncanggctctggtanggtcaancttattaanggngngggaaaaccttntgaanatttgccccngttganagatgaaaagtcnng

SEQ ID NO: 603 - DNA, 655 bp, Homo sapiens
  misc_feature (1)...(655): n = A,T,C or G
acttataattggcagtggaggaagggaacatacgctggcctggaaacttgcacagtctcatcatgtcaaacaagtgttggttgccccaggaaacgcaggcactgcctgctctgaaaagatttcaaataccgccatctcaatcagtgaccacactgcccttgctcaattctgcaaagagaagaaaattgaatttgtagttgttggaccagaagcacctctggctgctgggattgttgggaacctgaggtctgcaggagtgcaatgctttggcccaacagcagaagcggctcagttagagtccagcaaaaggtttgccaaagagtttatggacagacatggaatcccaaccgcacaatggaaggctttcaccaaacctgaagaagcctgcagcttcattttgagtgcagacttccctgctttggttgtgaaagggcancgggcttgcaacttggnaaaagggtgaatggttgccaaagaagccaaagaaanaaggncctgcaaagcntgtancctttgggccgggaaccacgcttaangggccnaaattccaagnacaacttggccgggcccgttacctaaangggatcccaactttngggnacccaaaacnttngggngnaaatcatngggncnaaaantttggtttccctgngng

SEQ ID NO: 604 - DNA, 490 bp, Homo sapiens
  misc_feature (1)...(490): n = A,T,C or G
acaacacacgaattccactctaaacttgaacgcaaagctatgttcctctctgcctcatggcagtgggccacagcatccttcaatcttttagttgagcgatacaactccactagccggatgttcacatggacgtcatcaggtcttacataaagttctgactgaatcaagtcaaaaagtttattccatccatcttcaccttcacaatctagaagctgttcctttagtttataaattgcaggacttcctgggaaaagttttgctgctctttcgacccagtattttgctcttccatcaggtaacatcatttttacaaagcaattctgcaatcttcaacacaagatcttttgtgttgggtttaattccactgaacgcctgtaacattnaacggntttctctgtgttttcttccattcataaagangacccagaaatctgtgagctttgggatccctctctcgcacattaaatgtaagtacctngggncgcgacca

SEQ ID NO: 605 - DNA, 612 bp, Homo sapiens
  misc_feature (1)...(612): n = A,T,C or G
acagaaggttgacgaaaattcttactgagcaagaaataaccttgttgtaattactaaaatttgagaaatgtgattcttgactggaaaaatagatgtgtcgtggaggccgaatgtttgcaccaaccaaaacctggcgccgttggcatcgtagagtgaacacaacccaaaaacgatacgccatctgttctgccctggctgcctcagccctaccagcactggtcatgtctaaaggtcatcgtattgaggaagttcctgaacttcctttggtagttgaagataaagttgaaggctacaagaagaccaaggaagctgttttgctccttaagaaacttaaagcctggaatgatatcaaaaaggtctatgcctctcagcgaatgagagctggcaaaggcaaaatgagaaacccgtcgccgtatccagccgcaggggcccgtgcatcatctataatgaggataatgggtatcatcaaggccttcagaaacatccctggaattactctgcttaatgnaagcaagctgacatttttgaaccctgcttctgggnggcctgtnggactttctgcatttggactgaaantgcttttcggaagtttantaantggacctnngcccc

SEQ ID NO: 606 - DNA, 577 bp, Homo sapiens
  misc_feature (1)...(577): n = A,T,C or G
gactttgaggcaagtgtgggccactgtggtggcagtggaggtggggtgtttgggaggctgcgtgccagtcaagaagaaaaaggtttgcattctcacattgccaggatgataagttcctttccttttctttaaagaagttgaagtttaggaatcctttggtgccaactggtgtttgaaagtagggacctcagaggtttacctagagaacaggtggtttttaagggttatcttagatgtttcacaccggaaggtttttaaacactaaaatatataatttatagttaaggctaaaaagtatatttattgcagaggatgttcataaggccagtatgatttataaatgcaatctccccttgatttaaacacacagatacacacacacacacacacacacacacacaaaccttctgcctttgatgttacagatttaatacagtttatttttaaagatagaatccttttataggtgagaaaaaaacaatctgggaagaaaaaaccacacaagacattgatcagcctgttngcgtttccanangtctttgattggcagcatggttncaaggaaantaggtacctc

SEQ ID NO: 607 - DNA, 312 bp, Homo sapiens
ggtaccaggccgctcaccacagtccgtggttcagcttcccccacgtcaatcttctctacatacaggctgtctgcatctgggtgcttctccacagtgatgattttccccacacggatatccagccgggatgggatgacctcctctggttctgaattcttggcagggcctttggccattggcttctgctttgagggatctgggtaggcagcgctggccagttttttcagggcaggggtattaaacttttcccggattggatccagcaacttgttcagtgcgacttcaacagaattcttcaggtctccaggatgt

SEQ ID NO: 608 - DNA, 614 bp, Homo sapiens
  misc_feature (1)...(614): n = A,T,C or G
ggtgcaacttccttcggtcgtcccgaatccgggttcatccgacaccagccgcctccaccatgccgccgaagttcgaccccaacgagatcaaagtcgtatacctgaggtgcaccggaggtgaagtcggtgccacttctgccctggcccccaagatcggccccctgggtctgtctccaaaaaaagttggtgatgacattgccaaggcaacgggtgactggaggggcctgaggattacagtgaaactgaccattcagaacagacaggcccagattgaggtggtgccttctgcctctgccctgatcatcaaagccctcaaggaaccaccaagagacaaagaaacagaaaaacattaaacacagtgggaatatcacttttgatgagattgtcaacattgctcgacagatgccggcaccgatccttagccagagaactctctggaaccattaaagagatctggggactgcccagtcagtgggctgnaatggtgatggcccgcatncttatgacttcatcgatgacatcaacagtggtgctgtggaatgcnagccggttaanccnaaggaaactttaatnanggtcattgcactggnaaaaaaaaaannaananaaaggnt

SEQ ID NO: 609 - DNA, 609 bp, Homo sapiens
  misc_feature (1)...(609): n = A,T,C or G
ggtactgagcacccctgttgtcaagaaagtgggagtaacatctgtaggaggttctttaactggtgggccaaatatataaacaactctgttaacgttgtgacacatgcgaggtataagcctagccagaaaaataagtgattcccagtcaggttcatctttactggagattccacacacgtaattgtaggaacgacagtcaccctgcacacctacagttttaattggcagcaagaaggcattcagtgaatgcagactggtaatttgcatcagcttctcctgatcctcttctgttgtgcaggctttgactctctgtaatagggtatgtggctttttaacacttgcagaaaaatcagctactattttcaaaatattgttggtttcaggaaagtccttacaaatataaggttcttcagcacatattactctgattgccaggccaggacctggaaatggatgcctggaaactaactcttctggaagtccaagttctcttggccaaaattctcacttcatctttatgaaaatctttcagaggtctatacttttcctcctttttaactttctgaatgactcttgggnatttggaanggtttgatgagttcactttnc

SEQ ID NO: 610 - DNA, 254 bp, Homo sapiens
  misc_feature (1)...(254): n = A,T,C or G
accattggtggccaattgatttgatggtaagggagggatcgttgacctcgtctgttatgtaaaggatgcgtagggatgggagggccgatgaggactaggatgatggcgggcaggatagttcagacggtttctatttcctgagcgtctgagatgttagtattagttagttttgttgtgagtgttaggaaaagggcatacaggactaggaagcagataaggaaaatgattatgagggcgtgatcatgaaagacctn

SEQ ID NO: 611 - DNA, 687 bp, Homo sapiens
  misc_feature (1)...(687): n = A,T,C or G
ggtacaaggatgccatccatttctataacaagtctctggcagagcaccgaaccccagatgtgctcaagaaatgccagcaggcagagaaaatcctgaaggagcaagagcggctggcctacataaaccccgacctggctttggaggagaagaacaaaggcaacgagtgttttcagaaaggggactatccccaggccatgaagcattatacagaagccatcaaaaggaacccgaaagatgccaaattatacagcaatcgagctgcctgctacaccaaactcctggagttccagctggcactcaaggactgtgaggaatgtatccagctggagcccgaccttcatcaaggggttatacacggaaagccgctgcactggaagcgatgaaggactacacccaaaagcccatggatgtgtacctgcccgggccggccgctcgaaaggggcgaaattnagcacactggccggccggtacttagtgggatncnancttcggtaccaaacntngcggnaatcatgggcatancnnggttcctngggnggaaaattggtaatnccgtttacnatttccccaccaacttccnaacccggaaaccttnaagnggaaanccntggggnggcctaatgggngggcttactcnccttaattggcttgggcttaatgggccccttttcaatngggaaacctnnt

SEQ ID NO: 612 - DNA, 673 bp, Homo sapiens
  misc_feature (1)...(673): n = A,T,C or G
gactgatgttggtgtcctgcagcgccacgtttcccgccacaaccaccggaacgaggatgaggagaacacactctccgtggactgcacacggatctcctttgagtatgacctccgcctggtgctctaccagcactggtccctccatgacagcctgtgcaacaccagctataccgcagccaggttcaagctgtggtctgtgcatggacagaagcggctccaggagttccttgcagacatgggtcttcccctgaagcaggtgaagcagaagttccaggccatggacatctccttgaaggagaatttgcgggaaatgattgaagagtctgcaaataaatttgggatgaaggacatgccgcgtgcagactttcaacattcattttgggttcaagcacaagtttctggccagccgacgtggtctttngcaccatgtctttgatggagagccccganaaaggatggctnaaggaccgaatcactttatncaggcttttggacangcctnttcaggagtnaccctggacaaacttgtacctttgggncggngaacaccncttaagggcnaatttcangcacactggcgggccgtaattaagggaatccaacttnggnanccaancttggggnaaancntgggcataanngttccctgnggnaaatngtattccctnccaat

SEQ ID NO: 613 - DNA, 279 bp, Homo sapiens
ggtacaaaaggagacaatccatccccgaaagtcatataagatgaactcttcctgtgcagatatcctgctctttgcctcctataagtggaatgtctcccggccctcattgctggctgactccaaggatgtgatggacagcaccaccacccagaaatactggattgacatccagttgcgctggggggactatgattcccacgacattgagcgctacgcccgggccaagttcctggactacaccaccgacaacatgagtatctacccttcgcccacaggtgt

SEQ ID NO: 614 - DNA, 653 bp, Homo sapiens
  misc_feature (1)...(653): n = A,T,C or G
gtttccacaaacttcgtggatcaaaacgaggtcttccagttctgcgggtcagaaggctgacccggggctcaaatctgggtgtcggcagtcctgcactccttctggaggctctaggggagaattcatttctggccttttcatttttagaggctgaccgtaattcttgacttcaggctcctccatcttcagagccagctgtgggtagttgaatctttttcccgtcacctcattgaggcctcccctctcctgcctccctccaccacttttttttttttttgagacagggtcttgctgtgttgcccaggctggagtgcagtggcctggtcatggcatcaaggctcactgcagcctggacctcctggttcaagtgatcctcttgtctcagtcccctgagacaatcccccacgcccagctacatattttttgtggatacagggtctcattctgntgcctagcttgtctggaactcctgggctcaagggatcttggagccttaaccctnctaaagtgcttgggaatataggcatgagtcactggaccttgggnccgaccaccttaanggccgaatttcagcacaattggcgggccggtacttaggggannccaactttgggaccaacntgggngnaatcatgggccnaactggttnccng

SEQ ID NO: 615 - DNA, 676 bp, Homo sapiens
  misc_feature (1)...(676): n = A,T,C or G
acatgtgaagattttttggcagcttagcgtggaaaccattgatcaccctgctctcatttctacctgttctgtgttggcaagggagagtgcccaaatgagcaagatatcgcagcaaaacagcactccaggggtgaacggaattagtgttatccatacccaggcacatgccagcggcttacagcaggttcctcagctggtgcctgctggccctgggggaggaggcaaagctgtggctcccagcaagcagagcaaaaagagttcgcccatggatcgaaacagtgacgaagtatcggcaacgccgagagaggaacaacatggctgtgaaaaagagcccggttgaaaagcaagcagaaagcacaagacacactgnagagagtcaatcagctcaaagaagagaatgaacggttggaaagcaaaaatcaaattgctgaccnanggattaagtgtacngaagcatgccaacgccttagctnatgggcctggctnctatcagcttgggaacccnaaagnaccagtttttccangaatccccagaccgaangggnccaaggggnccaacgttcgggacttgaaangggaaaaaaaacttggancttggcaaggacttgggcttncnaaattgganccgancccaanggatgaanaaccccttcaagaaaaccagcttcctttctng

SEQ ID NO: 616 - DNA, 694 bp, Homo sapiens
  misc_feature (1)...(694): n = A,T,C or G
ggtaccttctagatcttggagttgatatgaatgaaccaaatgcctatggaaatacacctcttcatgtagcctgctataatggacaagatgttgtagtgaatgaacttatagactgtggtgctattgtgaatcaaaagaatgaaaaaggatttactcctttgcactttgctgctgcatcaacacatggagcattgtgtttagagcttctagttggcaatggggccgatgtcaatatgaagagtaaagatgggaaaaccccactacacatgactgctctccacggtagattctcccgatcacaaaccattatccagagtggagctgtaatcgactgtgaggataagaatggaaatacccctttgcacatagcaacacggtatggccatgaanctgctgatcaacacttcttaataccagtgggtgctgacccttgcaaanncgtgggcataccttggaatggttcccccttccattttggcaagcccttaaaccggntttttcaagaattactggcnnaaaaaccttcnttcttttanggaattnganattngaaancccccaanggaattttngccnggaccttgggntaacatgccanttgnnacttggaagggnaatttgggaanggcctnaaaccttttnggngnaaacctggggccnaacntttattaaaangggcccaatttnggggaan

SEQ ID NO: 617 - DNA, 554 bp, Homo sapiens
  misc_feature (1)...(554): n = A,T,C or G
cgaggtaccgcaagggaaagatgaaaaattataaccaagcataatatagcaaggactaacccctataccttctgcataatgaattaactagaaataactttgcaaggagagccaaagctaagacccccgaaaccagacgagctacctaagaacagctaaaagagcacacccgtctatgtagcaaaatagtgggtagatttataggtagaggcgacaaacctaccgagcctggtgatagctggttgtccaagatagaatcttagttcaactttaaatttgcccacagaaccctctaaatccccttgnaaatttaactgttagtccaaagaggaacagctctttggacactaggaaaaaaccttgtagagagagtaaaaaatttaacacccatagtaggcctaaaaagcagccaccaattaagaaagcgttcagactatatctattgcgccaggtttcaatttctatcgctatactttatttgggtaaaatgggtttggcttaagggtggctnggaagaaaggtggaatnggaactgcccgggcnggccgctngaa

SEQ ID NO: 618 - DNA, 305 bp, Homo sapiens
acatgtgttcacaagggttactcctcaaaacccccagttctcactcatgtccccaactcaaggctagaaaacagcaagatggagaaataatgttctgctgcgtccccaccgtgacctgcctggcctcccctgtctcagggagcaggtcacaggtcaccatggggaattctagcccccactggggggatgttacaacaccatgctggttattttggcggctgtagttgtggggggatgtgtgtgtgcacgtgtgtgtgtgtgtgtgtgtgtgtgtgtgttctgtgacctcctgtccccatggtacc

SEQ ID NO: 619 - DNA, 604 bp, Homo sapiens
  misc_feature (1)...(604): n = A,T,C or G
acactctcatagtcactgaaagtaatatacactgacctgcaaaagtcagatgggaagacataaaggacctcatctttggttattagtgggtgaaaagaatctccatctgttccattaatcatattgcacttgtctgttatccaccagtcaagtgacgttttcccattccattccacaatttttgtaaagttaaggtaactgtcttctccagttagaaaaacatagtctccatcattagtcccatttttctcatagaataggccaaaatagggagagatatcgggcctgaaaacatggataagggacaagatttcatctttgtagccccagagcaattcgtcaactgtgtgagtcacaaagagcttctgctgataggctttcaacatggcctcgatgatctccctgaggaagtgcacctgggaccactctatgacagtcaatacaggaatatttaatggtctaattaagtnaaattttaagggctncaacagattgggtctcgttcaaaaccataggccttgttgctaacagcaganattggtggttcattatctncaaatggaaaattngctttggttctggagtncctgnaagggtatggncc

SEQ ID NO: 620 - DNA, 571 bp, Homo sapiens
  misc_feature (1)...(571): n = A,T,C or G
ggtactgtgaacatgactttcagatgctctttgccccttgctgtcatcagtgtggtgaattcatcattggccgagttatcaaagccatgaataacagctggcatccggagtgcttccgctgtgacctctgccaggaagttctggcagatatcgggtttgtcaagaatgctgggagacacctgtgtcgcccctgtcataatcgtgagaaagccagaggccttgggaaatacatctgccagaaatgccatgctatcatcgatgagcagcctctgatattcaagaacgacccctaccatccagaccatttcaactgcgccaactgcgggaaggagctgactgccgatgcacgggaactgaaagggggaactatactgncttccatgccatgataaaatgggggtcccattgnggtgcttgccacggccatcaaggcgctgtgacctatggcaacatgcatgtggacatttggtgnncagtgtaaaccttntgaatgcatataagaagctgcgnttggactattaccgtntgggngtgtcctgatcggntnaagggaggctgtntaaagcggngg

SEQ ID NO: 621 - DNA, 581 bp, Homo sapiens
  misc_feature (1)...(581): n = A,T,C or G
acattcggcctgagggccaggacagtgctttctcctggacggacctgctgctgaagaataattctgagctgcttaacaacctgggcaacttcatcaacagagctgggatgtttgtgtctaagttctttgggggctatgtgcctgagatggtgctcacccctgatgatcagcgcctgctggcccatgtcaccctggagctccagcactatcaccagctacttgagaaggttcggatccgggatgccttgcgcagtatcctcaccatatctcgacatggcaaccaatatattcaggtgaatgagccctggaagcggattaaaggcagtgaggctgacaggcaacgggcaggaacagtgactggcttggcagtgaatatagctgccttgctctctgcatgcttcaccttacatgcccacggtagtgcccaatcagcccactgcactccactcagctgagtatcngntgacaacttctgngaccttggccggacacctaaggcaatcaccatggcgcgtctanggaccactcgaccacttgcgaacatggcnatggtctgngaatgnccgtaattccncanntca

SEQ ID NO: 622 - DNA, 644 bp, Homo sapiens
  misc_feature (1)...(644): n = A,T,C or G
actgtttaccagatctttgcagatgaggtgcttggttcaggccagtttggcatcgtttatggagaatttgcaccatcctgggattgtaaacctggaatgtatgtttgaaaccccagaacgagtctttgtagtaatggaaaagctgcatggagatatgttggaaatgattctatccagtgagaaaagtcggcttcagaacgaattactaaattcatggtcacacagatacttgttgctttgaggaatctgcattttaagaatattgtgcactgtgatttaaagccagaaaatgtgctgcttgcatcagcagagccatttcctcaggtgaagctgtgtgactttggatttgcacgcatcattggtgaaaagtcattcaggagatctgtggtaggaacttcagcatacttacccctgaagttcttcngagccaangtacaaccgntccctanatatgtggncagtgggagttatcatctatgtgagcctnaatggcacatttcctttaatgnggatgaagatttaatgnccaatccaaaaggctgganttatgnaccctnggccgacccccttanggggaattccannnnnttggggggccgttctaaggggnnccancttgggcccaacntgggggaancatggcn

SEQ ID NO: 623 - DNA, 662 bp, Homo sapiens
  misc_feature (1)...(662): n = A,T,C or G
acaaagagctactccataaattacatcttgccaaggtgggagattgcatgggagactccggtgacaaacccttaaggcgcaataatagctatacttcctataccatggcaatatgtggcatgcctctggattcattccgtgccaaagaaggtgaacagaagggcgaagaaatggagaagctgacatggcctaatgcggactccaagaagcgaattcgaatggacagttacaccagttactgcaatgctgtgtctgaccttcactcagcatctgagatagacatgagtgtcaaggcagagatgggtctaggtgacagaaaaggaaagtaatgggctctctagaagaatggtatgaccaggataagcctgaagtctctctcctctttcagttcctgcaganccttacagcctgctttgggtcattcgcccatggtggcaatgacgtaagccatgccatttgggcctctgggtgctttatatttgggttatgacccnngagangttcttcaaaagtggcaacaccaatattggnttctactctantggngggggttgggatctgnggttggtctgtggggtttggggaaaaaaaagttttcccnaccttggggaaaggatttgccnccgttacaccctttaagggtttngtatttgactngnatn

SEQ ID NO: 624 - DNA, 682 bp, Homo sapiens
  misc_feature (1)...(682): n = A,T,C or G
acaccaagcatgggactttgaaataccagacagactgtgcccctaataatggttactttatgatccctttgtatgataagggggatttcattctgaagattgagcctcccctagggtggagttttgagccgacgaccgtggagctccatgtggatggagtcagtgacatctgcacaaagggtggggacatcaactttgtcttcactgggttctctgtgaatggcaaggtcctnagcaaagggcagcccctgggtcctgcgggagttcangtgtctctgagaaacactgggacccgaagcaaagatccagtncacagttacacagnctgcggaaagtttgcattttttaaagttctgcctggagaatatnaaaatcctngtactcatccaacctggggcgttgaaagaagcaagcaccacngtnccntgttaccaactccaatgccaatgncggncagtccccttcatagttgctggnntaccaatngtggtcttggcntntgtcccnaaattgattnggngaagccccttgtaanggccctaaagtttcntnntcnttttcttctttantttcctnnangaaggaannccttgggttncantggntnacctgngcctggggttccaanccnnataccnannntcttggggtatttngcctacccggtntcnnaaaaanatgg

SEQ ID NO: 625 - DNA, 502 bp, Homo sapiens
acatttccttgtagactctgttaatttcctgcagctcctggttggttctggagcagatgatctcaatgagagagtcctcgtcggttcccagccccttcatggaagcttttagctcagaggcgtcatactgagcaggtgtcttcaataggcccaaaatcaccgtctccaggtggccagataaggctgacttcagtgctgatgcaagttcctttttggtccttctctggtaggcgaaggcaatatcctgtctctgtgcattgctgcggttggtcaaaatgttgacaatggtgacctcatccacacctttggtcttgatggctgtttcaatgttcaaagcatcccgctcagcatcaaagttagtataggctttgacagacccatatgcacttggggggtgtagaagtgatcaccctccaagctgagcttgcacaggaatttcgtgaacagtagacattttgaaggaactgggcccgtgcgccgaagagctgaaaaccgtcccacc

SEQ ID NO: 626 - DNA, 935 bp, Homo sapiens
  misc_feature (1)...(935): n = A,T,C or G
acattcatcaaagaggaatttgtcacccaaggccatgtgcttttcagtggaaaggaaggagggaaacctctaaggccgcacggtgggcccacggagctagcacgtgggcgggactgaaggctagatgctgggattgaggtggggaactagagatgactctaaggcaggaacatctgtaccttcgggccgcganccacgcctaagggccgaaattcagcacactggccgggcccgttacctaagtgggaatcccgaagcttcgggtacccaaagcctttgggccgtaaaatcaattgggtccaattaagccttggnttttcccttggggggtggnaaaaatttgggtttaattcccggctttcaaccaaanttttcccaaccanccaaaccantttanccnaaaacccccngggaaaaggccnttttaaaaaggttggttaaaaaaggnccccttngggggggttnggccccttaaaattggaaantttggaaacccttnaaaccnttnaanccatttttaaaattttggcccgttttggccggccttttaaactttgggcccccnggttttttttcccaaagttcccgggggaaaaaanccttgggtnccnttggncccaaaccnttggccantttnaaattggnaaattcnggggcncnaaacggccccccgggggnnaaaaaaaggcccngggttttggccggtaanttnggggcccccttttttttcccggcttttccctttgggtttnaacttggaacttcnnttttgggncnttggggnccntttcggggttttncggncaaaaccggggatntcaagntttancttcaaaagggccgggaaatancngggttttcccccngaaatccgggggnnaaacccccgggaaaaaacctttttggaccaaaaggcccncnaaanggcccggaan

SEQ ID NO: 627 - DNA, 680 bp, Homo sapiens
  misc_feature (1)...(680): n = A,T,C or G
ggtaccacaactcccaggattttcctggatcaaaccttgtatctcttctgcaagtattgtgtatattggtctgagagacgtggaccctcctgaacattttattttaaagaactatgatatccagtatttttccatgagagatattgatcgacttggtatccagaaggtcatggaacgaacatttgatctgctgattggcaagagacaaagaccaatccatttgagttttgatattgatgcatttgaccctacactgactccagccacaggaactcctgttgtcgggggactaacctatcgagaaggcatgtatattgctgaggaaatacacaatacagggttgctatcagcactggatcttggtgaaagtcaatcctnagttggccacctnagaggaagangccaagactacagctaacctggcagtagatgngantgcttcaagcttttgggcagaccaganaaagganggcntattggctattgacccactttctanttccaagttancccgaaggaatccgaaaatcnagcccctgtgganaaattttggggaaacttggcncctgnctggtttaccaacaggggctttcccnaaatttttanggcctttngggggnttnanngaaaccctaaaggggtnnnctggggccaaaaccggccttaanngggnaaacttt

SEQ ID NO: 628 - DNA, 637 bp, Homo sapiens
  misc_feature (1)...(637): n = A,T,C or G
acttgtagggtggaggtgtcggtcaaagaccttctttatgatatcaagaaatagacatgtaacaaccatgaggattatggcaaaccaagcagaaccacttgacaggagctgaataaacacaaaatacatattctgggagcccaaaaatggccagagaatccctccataaaacaaggaaaatacaaaataaaatataatagatccccaggtaacgagatggttgatccaagtccaaaaatgagtttccagagccatctttactgtgactgtaataaccatgactgtgaagaccaaagtgccaaatgtccagtttccaaacatctggcatttccaagcagagatgtatctttccctattagtaaataggatcnaaaaagaaaataaaggcatgactgaacccaggatggtccaataaagaaatggtttaatacttaagaaggcggttttactaatggctcgataaaggtggcttaatttggnacacatgaaggnctacatgcttgttccaaaagactntttntcnnaattggtngggaagtaaaccaattttggttaaagtcagggnccttggccggacccncttanggcgaattccnnccnctgggggccgtcttaggggancaacttgggcccaact

SEQ ID NO: 629 - DNA, 446 bp, Homo sapiens
  misc_feature (1)...(446): n = A,T,C or G
acttctcatgtccatggttaatgaaaggcagccatttgttttgcgctgtgctgttctctattgtttccagtgtttcttgtataaaaaccaaaaaggacaaggagaaatcgtgtcaacacttttaccttctaccattgatgcaacaggtaattcagtttcagctggccagttattatgtggaggtttgttttctactgattcactttcaaactggtgtgctgctgtggcccttgcccatgcgttgcaagaaaatgccacccagaaagaacagttgctcagggttcaacttgctacaagtattggcaaccctncagtttctttacttcaacagtgcaccaatattctttcacagggtgataaagatcgacagacggggaaacnaaatacnaaccaagaagtggattattaatggtgctttggaccttggncgngancaccttanggcc

SEQ ID NO: 630 - DNA, 635 bp, Homo sapiens
  misc_feature (1)...(635): n = A,T,C or G
actagatattgtgcctgcaagtcataaaaaaaaaaaaaaaaaaagaaaaaaatgaaagaatgcctttccccttcagacaaaagaattacttttttcatttttcttaaaaaaagaggaaaagttataacacgaaacctaaattgacttgcaaaggaataccatgtaacaaatggcttgaagtagtctatcaaaaaattggggagatttttatttaatagtgagtcagcaaggcattttttgttgtttaaaaaaaatctcatttccttacagaaacagtttttagtttttaatgaacttgtaaacnaaaaagctcccatttcaaaataaaaacnaaatcccagatcatattaatgnttacngggggtacctttatctaagcaacatacntacctgttcagttgtaaganggtaactaaatttctgngaccaanatgcnttttttttaatacccngaacnttnttgaggtaatgcnnaatcctaangggaaactagnngnccctaagntttcttaagcnttcctttaaaagcngggaattntagccccattaaccggccnagnttttntatgcctaaancctggaantttggngntnccattaatgggttgnaacaaaancccccntttnaaangttn

SEQ ID NO: 631 - DNA, 694 bp, Homo sapiens
  misc_feature (1)...(694): n = A,T,C or G
actcatcttatactgaaagaacgtggtggctctaaatatgaagctgcaaagaagtggaatttacctgccgttactatagcttggctgttggagactgctagaacgggaaagagagcagacgaaagccattttctgattgaaaattcaactaaagaagaacgaagtttggaaacagaaataacaaatggaatcaatctaaattcagatactgcagagcatcctggcacacgcctgcaaactcacagaaaaacccgtcgttacacctttagatatgaaccgctttcagagtaaagctttccgtgctgnggctnacaacatgccagacaggtcgcaacctcccagcagtaggacaaccacttnagaaggagccctcggtacacctggatacaccattcaaaattctgntccanggccaactctttaagcctttctttgatgtgaaagatgccctttcagnctttggnaacttccagaacgttccaancccacngaaaaagggaaacccggtanccttngccgggaaccccccttaaggggcgaaattccannncacttggggggnccgttnctaaaggggatcccaaacttngggncccaaannttggggggaaancanggggccanaaannggntcccctgggggnaaaaatggntatnccggttcnaaaanttcccccccnaanatttnggggcn

SEQ ID NO: 632 - DNA, 252 bp, Homo sapiens
acggccatcttccagctgcttgcctgcaaagatgagcctctgctggtcggggggaatgccttccttatcctggatcttggccttcacattttcgatggtgtcactgggctccacctcaagggtgatggtcttgccggtaagggttttcacgaagatctgcattttgacctgttagcggataccaggatcctgccaatcaccaaccacgtccacccacagggacacaaacaagctcacccaacaaagccaacc

SEQ ID NO: 633 - DNA, 631 bp, Homo sapiens
  misc_feature (1)...(631): n = A,T,C or G
ggtactgttgattcaacaacaaaccttaatgggtgatgagcttttgcataccaatatgaatttgtcagcacttctgaaaactggccatcatttttcaaattcacaatttgctggatgtcagggaacaataggaagaagaatgagcgtcaattttcatgtcttcctttgcttcttcactggccttccatagaagtagtcagaaaaaaacaaagcaccatcaaccacacttcacaaacaattcatgttggcctaagctttgctcaacattcatatgacagaagatagaataatgaaaaggaactgctggcatcactttccccataatattacataaaaatggacagcacattaaataaacattctgntattaatcattaaatatattaacaccaaaaatcatgtataaaattaggaaataaatgtcctgcccggccggncgctcaaggccaaatncagncactggcgggcggtctagtggatccnactcggaccaacttggcgtaacatngncatactggttcctgggggaaatggtaatccnttacaantcncacactnacanccggaanctaaggggtaaacttgggtgcctaagaggngnctacntncattaatgngtggcncnttgccc

SEQ ID NO: 634 - DNA, 561 bp, Homo sapiens
  misc_feature (1)...(561): n = A,T,C or G
gtgaaattggtgagtttggtggtgatttcccggtgcctgcaatgaactcctggtgaaatgtaggcgaggttggaaagtagctgggacagacaggagatttcctgaagtttggagataaacacgtggtagagactggggagtaacacagtgaaagtggggagcttggtggtgatccctgggatcctggaaatgactggggctgaaatgtgggcgtggttggagagtagctgggacagacaggagggtttgtaagggctggtggtgaagacgtgagagagactggcgaggatctcactgaggtctctgactttctaggtgtttctggggtgtgggagacatacaacagctgaaaactggacatagttggacagcactgggacagaaaggagatcgtgatgggtgggggtgactgtctattgtgccaacagantaccaaaagtatatcagaccgtttgctttcnttgaatggcctctggctntcaaaagcgnatggtangacactcagagtattctnctaagcnttgataatacactgnttatnctgcntgtgtctanctgcnc

SEQ ID NO: 635 - DNA, 630 bp, Homo sapiens
  misc_feature (1)...(630): n = A,T,C or G
accgaggctgctaaagctgccagtcacaacccagcatgtcaactggttcctcatgctctgtttggtgtggaaattcacatgtgccctgacactgaggaagcaattgcttaaaatcactttccaataacagctgataaaatattttgcaggtttgtcatgcaaggtttatttattaggtggctattcaaagtttgtatagcaaccacttaagcagaactaaattaatattcactgagcactgtaacgatggaagagggcttttcctaagggttgggttgggagttgtgcttctgtgaaattaacatctctcactcattgccaagattctctgcttaaaaatattagttttctgtgctggtgccaaaatagcaatttaagcnaatgtagtgccagaatgacacatgaacctnggactnagggaacagttncctgctgnggagtaccttgggcgngaacacgcttanggcgaattccacacactgcgggcgtactaanggatccaactnggnaccancttggcgaatcatggcatactggttcctggggaaaatggtatccgttacaatcncncacntaccagccggaacctaannggnaaactgggggcctaatggngactacntcattant

SEQ ID NO: 636 - DNA, 640 bp, Homo sapiens
  misc_feature (1)...(640): n = A,T,C or G
actcctattgccgccagtggggcctgtggaatgagtgtgcatggaggccctcctgtgctgggggaatgagcccagagaacagcgaagtagcttgctccctgtgtccacctgtgggtgtagccaggtatggctctgcacccctctgccctcattactgggccttagtgggccagggctgccctgagaagctgctccaggcctgcagcaggagtggtgcagacagaagtctcctcaatttttgtctcagaagtgaaaatcttggaaaccctgcaaacagaacagggtcatgtttgcaggggtgacggccctcatctatgaggaaaggttttggatcttgaatgtggtctcaggatatccttatcagancttanggtgggtgctcanaataaggcangcatttgangaaaaatcttgggttctctttacagtgcccacttcttacacacccttgaggcaaggaatgcttgcttacaagtaccttgggcgggaacacgcttanggccaaattcaacacacttgccggccgtactaaagggatccancttngganccaacttggnggaaacatggcnaaatggttccntggggaaatgnaatccgttcaattcccnnaantntcaaccggaaccttaagggtaan

SEQ ID NO: 637 - DNA, 470 bp, Homo sapiens
  misc_feature (1)...(470): n = A,T,C or G
acctggtgaccttgaatgtgattaggactgggagctccgtgaggccagagacctatgttcatttagcctacataaaagacactcaataaatagctggtaaaataacaaatgaataaatacatatcatcaagggttggggtcagtagacagcagtgcccaagctggcatccgtcaggaagtgtgggcctttgtgttttgatgctacacatgtctatggagggccacttcttctgtaagtctgtggggcctcagcatacccaataggcagcaagtttcagtatttcccagttgtatgtcctcatggtggggctatgtctcccccaccacgtcccctctcatcaggctagactttaacatccatcaatcatgtcttgagtcttgctccttcctcttggcttantcatgtgactacngatcaanatcntggcctaatggtttaagtgtnccangtaccttnggccgggcccacg

SEQ ID NO: 638 - DNA, 391 bp, Homo sapiens
  misc_feature (1)...(391): n = A,T,C or G
actggaacatcaagttaaatacaaatactcagaactaaccactgtccaacaacagctaattagggagacgctcatatcatggctgcaagctcagatgctgaatccccaaccagagaagacctttatacgaaataaagccgcccaagtcttcgccttgctttttgttacagagtatctcactaagtggcccaagtttttttttgacattctctcagtagtggacctaaatccaaggggagtagatctctacctgcgaatcctcatggctattgattcagagttggtggatcgtgatgtggtgcatacatcagaggaggctcgtaggaatactctcataaaagataccatgagggaacagtgcattccaaatctggtggaatcatggnacctn

SEQ ID NO: 639 - DNA, 329 bp, Homo sapiens
acatgctgacccaccaggaactagcctccgatggggagattgaaactaaactaattaagggtgatatttataaaacaaggggtggtggacaatctgttcagtttactgatattgagactttaaagcaagaatcaccaaatggtagtcgaaaacgaagatcttccacagtagcacctgcccaaccagatggtgcagagtctgaatggaccgatgtagaaacaaggtgttctgtggctgtggagatgagagcaggatcccagctgggacctggatatcagcatcacgcacaacccaagcgcaaaaagccatgaactgacagtcccagtacc

SEQ ID NO: 640 - DNA, 764 bp, Homo sapiens
  misc_feature (1)...(764): n = A,T,C or G
gcggccgaggtacttcaccatcactgactccatggacttgatcagccgccgctggatgtatccagtctcagcagtcttgacagccgtgtcaatgagcccctcacgaccccccatggcgtggaaaaagaactcagtgggtgtgaggccggctaggtaggagttctccacaaagccacggctctcaggcccgtagtcatccttgatgaagtgaggcagagtccggtgcttgaagccaaatggaatccgcttgccctcgacgttctgctgtccaacgacagcgatgacctgggagatgttaatcttggaacctttagctccggacacgaccatagacttgaagttgttgnattcagacagggatttctgaagcagaaggaaccagtcttggcttgggcattcggtaanaatgcgggtcacctgaatcttcaaaacgtctggnccgcaaaatggttcccctgggggttggggcttccancnttaattggtgggggngccctttnttggaaggaaccctctaattaacggtccttggctttgggcctttccttaaataaggggtnctngnaaagggccctngggnaaaggncnttaaaaaaatccnccaatngggagnnccccccaanggccccaatnngtnttggancctttaaaanncccgggggaaaaaaccttttngncaaaaacccccntttggggncccttttaaanaaaacccttgggaatgggggaatttnttnncccccaaaanaggtttnaaaacccgg

SEQ ID NO: 641 - DNA, 540 bp, Homo sapiens
  misc_feature (1)...(540): n = A,T,C or G
ggtacagtagccatgaactacatacagtgacgcctctagaaacgtggttagtgcaactgaggaaggaatttttaatcttatgtgattttaattggcttaactttaaacagccgcatgtggttactgtattggatagcacagccctagagcctgaagaaagcaaaccaaagaacaccagctgggtcccaaacagaaggcagaaagggtagaaccatccacctcaactattccagccccatcagaaggcaccaggaacagggcaagagaaaaaggcaaaaacccacccagcccatgaaaattcactcctcaaccacccagcacatcaaactggaacaccacactatttcctgaaaaaatatattattattttctagaccaaggagatatatatatatagaaccagcacaattccacatcctcatatatttggactgtaaaaaacttgttcgcaantttttaaagacantnaaggcagctagcgggtaagtaaaaactgggaggtatgaaacagagaaggagagctttanttatnaaaaaaaa

SEQ ID NO: 642 - DNA, 608 bp, Homo sapiens
  misc_feature (1)...(608): n = A,T,C or G
ggtactagtgagaagagggaatatgcattgcagttcagcaaagccggaattctgtgttgaacagatgtctgtctccctagtgtgtgactcacaccttgtggctgccttcagagcgccacctccagatcagatggggacacacaacccctggatatgtttcattgtcagattttgtgcttgattttaagaatggaattgtgggtatctttccttttttttaatgtatcttaactgttgcctgtcagtgtttacaaactagtgcgttgacggcaccgtgtccaagtttttagaacccttgttagccagaccgaggtgtcctggtcaccgtttcaccatcatgctttgatgttcccctgtctttccctcttctgctctcaagacaaaggttaattaaggacnaagatgaagtcactgtaaactaatctggcattggtttttaccttccttttctttttcagtgcagaaaattaaaagttangtattaaagcacccgtaaaaaaaaataactntantacaaanaaaagcttgtncaagctttntttttttntnnttttttttttttatttccccggncaaaaaagttttttnantcaaantcaagggttnan

SEQ ID NO: 643 - DNA, 669 bp, Homo sapiens
  misc_feature (1)...(669): n = A,T,C or G
acagagtcatttacatagattatgttgtgctttgtgtttattctccacactttcagtccatattctgtcctgtatatgtttcccatttttccaggcattttagttccaggccagactctgccaatatcaccagttgcaacagctccaggtctcctgtgggttttcgtttgaccatgcgtagcaggctggcctttaaatccccatcttttcatgacaccttgaaaacctttaccaatagttttggctgtgacatccacatactgtcctggacgaaagtgagcagcataaagaggagtgcctggtttaattgcagcattatctgttatattaaagattttaactgtctgtttcggcggcaatccaagttcccggtaaaattccaatatggatgtagctttacgaaaacgtgatcaggttttccttctacagacagggttgccatttttcattacaggtttccttttgacgtatattttaagacatgacagtcttgnacactagaattatggtttaagtttcctttggnattaagagatatataaccctttcaaaacaatctggtccttaaaaaatntcaataatggaatgaattttcttaaaaaaggggagaatccaccnntgcacctgctttggnnttaanaaaatatgggtaaacatttacttccntnn

SEQ ID NO: 644 - DNA, 572 bp, Homo sapiens
  misc_feature (1)...(572): n = A,T,C or G
acaagctttttttttttttttttttttttttttttttttcatattcactanttgngacatntaactgctcaangatttcttgaatacgtttttcaatttgancctngtcaccttttccttttaanagcatggcatcgtctttggncacaangacctntccaacttttcctaagtcatgaggctgaacgtcttcaanattcagggtcaatccctnttctccaaacacctacaaaaagagttaaacgtaaacctgttgtaggttacagtttntgccattataccaagttnattaatacnccatgcaananaatcatcaaaatactttatttctttgaaatgagagattttaanatcactgttagtccanaacaagacttgagtatagtctntttcactgnatttccaaattctcaattttcacaactggggtaattattaccagcnttacttgnnaaaaaaacnttcnaaggtcacacttactgggaanagccaggacaanancataggccnttgactnttaagtcctanaatcccttggnacatacncttttacctttnaaactgnngcttgg

SEQ ID NO: 645 - DNA, 690 bp, Homo sapiens
  misc_feature (1)...(690): n = A,T,C or G
ttgtgagaccctcttcattctggtgttgtccttgaaccaacagcatcccctggaacgccccaagcaagaccaaggcagatactatgaggcaggcagcacagggcccaaatcaagaattggtgcagtcgaatcagggctgtgggagaggccctatgtattccggattcccagggcttgctctaattcttgtcgtctctgctgcaccttggagtagaagtatcggcacacagcctcctgagcccagggctggaagtagaactcagctcggcgctcctcctctgggttacccaccacatcagtcattgtcttgaggtccctgcactgggactgaagccagtcattgatgaaaccctgagggtctctggccaaacttaacatgaactcccgctgagtcttcagctggttgatgggtttctattggctcatggatcttggtggctaaagtaccaatcttctggtggcccggcantgggacagcagaaaaagaaatcatcttggggctttcaaggnggcattcactttnaccatcaatggcataacaagctggcctttttctnaacattcgggtcaacactgatgacattgaataanganaataggttntggnggcattaaccangnatggaaccncttagggactttgaaacttatcnntgagacttaananttntgnggaccttgccgaacncg

SEQ ID NO: 646 - DNA, 770 bp, Homo sapiens
  misc_feature (1)...(770): n = A,T,C or G
cgaggtacattccgctcacggatctcagcttccagatggtggatgaactggaggcagtgcccaacatccccctggtgcccgatgaggagctggacgctttgaagatcaagatctcccagatcaagagtgacatccagagagagaagagggcgaacaagggcagcaaggctacggagaggctgaagaagaagctgtcggagcaggagtcactgctgctgcttatgtctcccagcatggccttcagggtgcacagccgcaacggcaagagttacacgttcctgatctcctctgactatgagcgtgcagagtggaggggagaacatccgggagcagcaagaaagaagtgtttcanaaagctttctcccttgacatcccgtggagcttgcanaatgcctgacccaacttcgtgttggtggaaacttccagaacttgtncacaagcatttcccgcttgacccattcaatttaagggaagaatgaatgaagtcttccnggggctttttattggggttttctggaatggtcattcantccacttnaagcccncttgggaatttnaagcccgaggtttcaaaatcttgtanccttggcccngggccgggccggttccaaaggggcgaaatttccagcncacttgggngggccggtacttannggggatcccaacttcggnncccaaccttggnggnaaancatngggcctanctnggttccncgggnggaaaatggtattnccgttccaatttccccccanntttnnaaccggagctt

SEQ ID NO: 647 - DNA, 454 bp, Homo sapiens
  misc_feature (1)...(454): n = A,T,C or G
acttggaatcctccaggaagggcttcaggacctggttggggaagaccttcatcaggatcttgtgtttccgcagctggtgtcgcataagaagcttgtcctctgcactcagagccacattctggcagacggctatcattcggttgtcctggaaaactgctgctatctcccggcggagaagcctgatgaggcctatctcctcctgtggggggctgggaggagatggcacgtatcttccaagtatgttctgaaaattaaacagggtaacctatttttgatgttatttcaaactgctatattcatctatgtctagttaaaaacaatttttggtttattcacttacataatgttcttatagtgatattttttccacttattccanaagtgttaggtgattattctacacttcttgngcccattctatggagaataaagatggtcctnggccgcgaccacc

SEQ ID NO: 648 - DNA, 532 bp, Homo sapiens
  misc_feature (1)...(532): n = A,T,C or G
ggtacatgtgggagaaaaacttaagtgtgatgagtgtggtaaggaattcagtcagggcgctcatctacagacccatcagaaagtccacgtgatagagaaaccatacaaatgtaagcaatgtgggaaaggtttcagtcgtagatcagcacttaatgttcattgcaaggtccacacggcagagaaaccttataattgtgaggagtgtgggagggccttcagtcaggcctctcatcttcaggaccatcagagactccacactggggagaagccattcaaatgtgatgcatgtggtaagagcttcagtcggaattcacatcttcaatcccatcaaagagttcatacaggagagaaaccatacaaatgtgaggagtgtggtaagggcttcatttgtagctcaaatctttacattcatcagagagtccacacaggagaaaaaccctataaatgtgaggaatgtggtaaaggctttagtcggncttcaagtcttcaggcccatcagggagttcacactggagagaagtcatacatatgt

SEQ ID NO: 649 - DNA, 493 bp, Homo sapiens
ggtacaaaattgttggaatttagctaatagaaaaacatagtaaatatttacaaaaacgttgataacattactcaagtcacacacatataacaatgtagacaggtcttaacaaagtttacaaattgaaattatggagatttcccaaaatgaatctaatagctcattgctgagcatggttatcaatataacatttaagatcttggatcaaatgttgtccccgagtcttctgcaatccagtcctcttagaaattggtttctctctttgggagattcagactcagaggcagccagaggggacaggtcaagagctgaaataatcacataactactctaattttcttcattctattgactgtgtcaagttatagacacagccaaagtgtttttcttctgcctctgatgatttgagaagatgaagaacatgagcaatttctcattgcttaaagaaaaacttggcacataagaggctgagtgtagtagagtatctgtcctg

SEQ ID NO: 650 - DNA, 693 bp, Homo sapiens
  misc_feature (1)...(693): n = A,T,C or G
gagactttggatccttcctgaggacgtggagaaaacttgctgctgagaaggacattttgaaggttttgttggctgaaaaagctgtttctggaatcacccctagatctttcttgaagacttgaattagattacagcgatggggacacagaaggtcaccccagctctgatatttgccatcacagttgctacaatcggctctttccaatttggctacaacactggggtcatcaatgctcctgagaagatcataaaggaatttatcaataaaactttgacggacaagggaaatgccccaccctctgaggtgctgctcacgtctctctggnccttggctgtggccatattttcccnccggggtatgaacggnttctttttccgcggactctttcgcaacccntttggcaggccccattcaatgctgaatggcaacctggtngctgcactggtggctgctttattgggactgggtnaaggaacttantccggttgnaatgcttgatnccgggncccttnggtaattgggcnttttntgnggactnttggncaaggtttgggncccatgtanccttgggccggnaacacccttangggcnaanttccgcncacttggccgggccgtactanagggaatcccaacttggnacccaacnttggggnaaacatnggcanaactggttcccggggggaaaatgg

SEQ ID NO: 651 - DNA, 678 bp, Homo sapiens
  misc_feature (1)...(678): n = A,T,C or G
ggtacgaagtttgttaccacagtagagataatttagtagaaaaatgctttgaggcttcagtatttgtaagattttgcattagccagatgctaggttgttgaaggcatttcagtgttgataataacctgagcagacttctttacaaatgggatctgtttctatatgtgtatatgcccacttaccattcagagagactggtctttctctttgtcttccttcacattgctgtgtcagttctacacctagtcttttcagcacttagcaaattcaaattttgatttttttgtcagcttagttcactttaaggcatattggcatggtgtgtgaaagtgatgttttgccccagtattgaggacttttagatccnaataatgactcattaaatataattatgttttaagtatacctgaatttctggtagcttaaaatgttaattctcaggaatgattttctcacacttttggggtggctaataataaaagcactggtttattctcaaaactccttttttcaaaattagggagagagcnnaagtggacattttatgtgaacccctttgnaaanatgggggntngantgcngagaaaccaatggagttttngntgcnaaaaggttttttcccgnaangtaaaattggaataantggcnattgaggacccttgnnctgcccggcggcnn

SEQ ID NO: 652 - DNA, 676 bp, Homo sapiens
  misc_feature (1)...(676): n = A,T,C or G
ggtacaagcttttttttttttttttttttttttttttgtgtttaaatgcattttatttttagacaacctacatgacatgtttttcttaaaaacaatgcctccactccaaataaatcacagtcaaaataaatgaagagctcaagatgacatcagtcccatttgtcttaagtcctggtgttgtgtggatgacaagcagaagccagttatgatgacaggtgatagatccaaaataattgccacatttgttaacatttttccatttctaaaccatccttaaagaaaatcatatatggggtcacaccatcctcacggtagtccaatagagcaaccatgccatctggattcatgttttcaccaataaagaactggtaagtttttgaaattagcaagggatgtgcttgatttgttctgcaacccctggcataaaaaggtttactctttctnggctctggtctttaaggttncctttgaatggattcatgtaacctttgatgtaccctggcccggccggccaagggacntgtaaaagngccccaatccacccganaanaaataaggggtttnttccgcgnttanganctcctttggaccttttttaancttgcctgnnggaaattaatctggccntttacctngganaatagaaaatantttttcccgnaaccttgaacttcnn

SEQ ID NO: 653 - DNA, 468 bp, Homo sapiens
tcgagcggccccgggcaggtactccagcattggttatagtcatgggaaaggaaggtgtccacggaggcacacttaacaagaaagcatatgaactcgctttatacctgaggaggtctgatgtgtaagcagcctctccccatctacctagcaactgtcttcatcaacaaccctaattatggtcacaatgctaccaaactgtagatggtagctaatttttctttacctattttctaatgtcatgattcctgtttgcccaatggatcatttgtatgttaaccactgtatgtaaccaacccttatctggcaacataattgcagcacaataatgatttgcatgataccttgaaattggggggagggggcatgccaagttgggcatcactttgtcttagcaattaatgggatattgattactaaaataagttaatattaaacaaggtgccggttgtaccttggccgggaacacgc

SEQ ID NO: 654 - DNA, 612 bp, Homo sapiens
  misc_feature (1)...(612): n = A,T,C or G
actgaagagcccatggatactacttctgcagttatccattcagaaaattttcagacattgcttgatgctggtttaccacagaaagttgctgaaaaactagatgaaatttacgttgcagggctagttgcacatagtgatttagatgaaagagctattgaagctttaaaagaattcaatgaagacggtgcattggcagttcttcaacagtttaaagacagtgatctctctcatgttcagaacaaaagtgcctttttatgtggagtcatgaagacttacaggcagagagaaaaacaagggaccaaagtagcagattctagtaaaggaccagatgaggcaaaaattaaggcactcttggaaagaacaggctacacacttgatgtgaccactggacagaggaagtatggaggaccaccttcagattccgtttattcaggtcagcagccttctgttggcacctgagatatttgtggggaaagatcccaagagatctatttgaggatgaacctggtncantaatttgagaaaacctngacctatatggggatcntcgtctaatgatgggatcccttcactgggcttnaataaanggtntgccgttggcaantttttgnc

SEQ ID NO: 655 - DNA, 608 bp, Homo sapiens
  misc_feature (1)...(608): n = A,T,C or G
ggtactttgtcctggaggaagggcacgactacacttcttccaaggggcagaacatggtgtgcggcggcatgggctgcaacaatgattccctggtgcagcagatatttaacgcggcgcagctggacaactatacccgaataggcttcgccccctcgtcctggatcgacgattatttcgactgggtgaagccacagtcgtcttgctgtcgagtggacaatatcactgaccagttctgcaatgcttcagtggttgaccctgcctgcgttcgctgcaggcctctgactccggaaggcaaacagaggcctcaggggggagacttcatgagattcctgcccatgttcctttcggataaccctaaccccaagtgtggcaaaagggggacatgctgcctatagtctgcagttaacatcctccttggccatggcaccagggtcngaaccacgtactacaatgaanccacaggtggcaaaatgttcctcgtgccttctgtggattaaactgggaccatggcttgtcctagncctttgcngncttaaccaacacttgattgcanttgggagtaaatggcaagcctccagagcncactgtnttgctgaggactccgcgcc

SEQ ID NO: 656 - DNA, 659 bp, Homo sapiens
  misc_feature (1)...(659): n = A,T,C or G
accaaactgaccaatgggctgcaagaggtttagattattgctacccacaaaattctgagccaaattgataatggtcatcattagtgacatctcgccatgatgataagaagacatttcagccactgatccagctaattgggcaacctttacttctcgcttgtcattccgtttgaagcaagtaaacaaaacctttctctgacctggtttcaaaccatccaccatagaagggatagatctctcgttatcagaatttgagaacaagataagttccttgttgatgaagtcattatatgtcagatatgtggtagtttgtccatacaagtaatcctcaggaagcccaagtaactttcgttgtcttctatcctccatgaaattagttaaccattcctttcgatcatctatctgttttttgctaaaggccaggctgatagcagcatcatcttcaggaccagaatatttgaactggatacgatgtcttttcatatctgcaaagtatctttacttcctttgatgtgctggtgcccaaacctttgnaatattggcttttcatttttatgattgggagtagaactcttncactcttcaaattcaggaangcttnaaaatgcctttcttgcttggtttagancctttccatgggagtgataaatcctccgaaa

SEQ ID NO: 657 - DNA, 676 bp, Homo sapiens
  misc_feature (1)...(676): n = A,T,C or G
ggtacagaattatataattctaacgcttaaatcatgtgaaagggttgctgctgtcagccttgcccactgtgacttcaaacccaaggaggaactcttgatcaagatgcccaaccctgtgatcagaacctccaaatactgccatgagaaactagagggcaggtcttcataaaagccctttgaacccccttcctgccctgtgttaggagatagggatattggcccctcactgcagctgccagcacttggtcagtcactctcagccatagcactttgttcactgtcctgtgtcagaacactgagctccacccttttctgagaagttattacagccnagaaagtgtgggctgaaaaatgggtgggttcatggttttggattaatggatctttttggatgggaaagactatattttgggacctcatcttttcccaggatgacccagaagctanaacctgctaaaaggattcttggaacntgaagggtattaatacnaacccnntcatggnggnatcctnggaacctgccgggaagaaggccnttggcccgtttaatgcnccggtgctnaacaagtctgnttcttgnntttcacttcancttggggccctggaatcanctggcnctggtgnncagtttaactatgncttgntggaacccctaaggccttangccttaccaaag

SEQ ID NO: 658 - DNA, 646 bp, Homo sapiens
  misc_feature (1)...(646): n = A,T,C or G
ggtacaatggaacaaacaacaagaacacacctgtctatgtgtcctcaccaacctgggagaatcacaatgctgtgttttccgctgctggttttaaagacattcggtcctatcgctactgggatgcagagaagagaggattggacctccagggcttcctgaatgatctggagaatgctcctgagttctccattgttgtcctccacgcctgtgcacacaacccaactggaattgacccaactccggagcagtggaagcagattgcttctgtcatgaagcaccggtttctgttccccttctttgactcagcctatcagggcttcgcatctggaaacctggagagagatgcctgggccattcgctattttgtgtctgaagcttcgagttcttctgtgcccatccttctccaagaacttcggctctacaatgagagagtcnggaatctgactgntggttggaaaagaacctgagaacatcctgcaagtcctttccagatgagaaaatcgtgccgattacttggtccaatcccccggccaaggagcccnaattgtggccagcaccnttttaacctgacttttgaggatggcnggtatntgaaacatggtnaccgatctggcctganactgactnngnncnntnaancctaaan

SEQ ID NO: 659 - DNA, 673 bp, Homo sapiens
  misc_feature (1)...(673): n = A,T,C or G
actgtgtccaacagctgaaggaatttgaggggaagactttagtgtcagtcaccaaagaaggcctggaacttccagaggatgaagaagagaaaaagaagcaggaagagaaaaaaacaaagtttgagaacctctgcaaaatcatgaaagacatattggagaaaaaagttgaaaaggtggttgtgtcaaaccgattggtgacatctccatgctgtattgtcacaagcacatatggctggacagcaaacatggagcgaatcatgaaagctcaagccctaagagacaactcaacaatgggttacatggcagcaaagaaacacctggagataaaccctgaccattccattattgagaccttaaggcaaaaggcagaggctgataagaacgacaagtctgtgaaggatctggtcatcttgctttatgaaactgcgctcctgncttctggcttcagtctggaagatcccagacacatgctaacaggatctcagggatgatcaaacttggtctgggtattgatgaagatgaccctactgntgatgatcccatgcttgctgnaactgaagaaatgcccncccttgaaggagataccacccctnacgcctgggaanaagtnactaactttggcttanggatnnttaccngtcagaccttggncggacccccttagggcnaatcc

SEQ ID NO: 660 - DNA, 580 bp, Homo sapiens
  misc_feature (1)...(580): n = A,T,C or G
acaaaacgccacattctcacttgtattgggagctgaaaaatgggatcacatggacgcaggacggggaacaacacacactggggcttttcgggagacagagcgttaagaaaaacagctgatgcatgctgggcttaatacctaggtgacgggttgacaggtgcagcaaaccaccatggcactcgtttaccttagtaacaaatatacacatcctgcccatataccccagaacttagaaacagaacgaaacaaaagaaaacgagaaagcaatagcaaatcgctagcgggaaaacaaattttcaaactcagaaaatgacagaccaatttttgcttcaaatcatggttcttaacccaggtgccataaggtcaggataaagaatttgattacatattgtaaataagacatgcagcaaatgaccagaaaaattattcccaacatatgtgtgtcttcgaattcaatggtgacgctatctaccgggacataacattagattccaaagggccgagtnncacaagactgncctnccatactaataacnatgaaagccctacgttgggtttacctgcttttntancagctggg

SEQ ID NO: 661 - DNA, 710 bp, Homo sapiens
  misc_feature (1)...(710): n = A,T,C or G
ggtacatataaatgaatctggtgttggggaaaccttcatctgaaacccacagatgtctctggggcagatccccactgtcctaccagttgccctagcccagactctgagctgctcaccggagtcattgggaaggaaaagtggagaaatggcaagtctagagtctcagaaactcccctgggggtttcacctgggccctggaggaattcagctcagcttcttcctaggtccaagccccccacaccttttccccaaccacagagaacaagagtttgttctgttctgggggacagagaaggcgcttcccaacttcatactggcaggagggtgaggaggttcactgagctccccagatctcccactgcggggagacagaaacctggactctgccccacgctgtggccctggagggtcccggttgncagttcttggtgctctgtgttcccagaggcaagccggaggtttgaaagaaaggaacctgggatgaaggggtgctgggtataaaccagaaaagggatngggttcctgnttccaangggacccctttggcctttcttctggcctttcctaaggcccaggnctggggnttggncccttgggccgngaaccacgcttaagggccgaaattccagcacacttggccggccggtacctagtgggatcccaactttgggtccaaactttggcgtaaatcatngggcctaacttngttn

SEQ ID NO: 662 - DNA, 411 bp, Homo sapiens
ccaaaatctggaatgttcatagtgtcctcaatgtccttcattccctggtagacaaatccaacatcaaccgacagttggaggtatacacaagcggaggtgaccctgagagtgtggctggggagtatgggcggcactccctctacaaaatgcttggttacttcagcctggtcgggcttctccgcctgcactccctgttaggagattactaccaggccatcaaggtgctggagaacatcgaactgaacaagaagagtatgtattcccgtgtgccagagtgccaggtcaccacatactattatgttgggtttgcatatttgatgatgcgtcgttaccaggatgccatccgggtcttcgccaacatcctcctctacatccagaggaccaagagcatgttccagaggaccacgtacc

SEQ ID NO: 663 - DNA, 633 bp, Homo sapiens
  misc_feature (1)...(633): n = A,T,C or G
ggtacttggttttaatgctcgtcagcgaaaagcctttcttaatgcaattatgcgatatggtatgccacctcaggatgcttttactacccagtggcttgtaagagacctgcgaggcaaatcagagaaagagttcaaggcatatgtctctcttttcatgcggcatttatgtgagccgggggcagatggggctgagacctttgctgatggtgtcccccgagaaggcctgtctcgccagcatgtccttactagaattggtgttatgtctttgattcgcaagaaggttcaggagtttgaacatgttaatgggcgctggagcatgcctgaactggctgaggtggaggaaaacaagaagatgtcccagccagggtcaccctccccaaaactcctacaccctccactccaggggacacgcagcccaacactcctgcacctgtccacctgctgaagatggataaaatngaaggaaaatacctcaaagaaganagagctngaaggagaaaaggaggttaaactacagccctgaactgccatgatgactgcccggcggccgtcaaaggcnaatcaaccatngcgccgtntaatggntcaactnggaccanttgcnaacatgcnaacttgtcctgggaaatgnnc

SEQ ID NO: 664 - DNA, 598 bp, Homo sapiens
  misc_feature (1)...(598): n = A,T,C or G
gcgtggtgcggcccgaggtactgggtccaaatgctggagaagttacacaaggctttgcagctgcgctcaaatgtggactgaccaaaaagcagctggacagcacaattggaatccaccctgtctgtgcagaggtattcacaacattgtctgtgaccaagcgctctggggcaagcatcctccaggctggctgctgaggttaagccccagtgtggatgctgttgccaagactgcaaaccactggctcgtttccgtgcccaaatccaaggcgaagttttctagagggttcttgggctcttggcacctgcgtgtcctgtgcttaccaccgccaaggcccccttggatctctttggataggagttgtgaatagaagcagcacatcacacttgggtcactgcagaacttgaanttgacattggcaggcatcnaggatnatccatgagtcaccagtctnagccatgtgtaggcgtatgacactgcaaatatttacataccttcctgggattctatctctggaagttnnggtgattttctttttcatggnaanattaantaaactncattatttgcaacanntgttaatcntcagggtgtctgaagg

SEQ ID NO: 665 - DNA, 658 bp, Homo sapiens
  misc_feature (1)...(658): n = A,T,C or G
acccaaaagcagtgcaggacctctgcagctggagaatctggagcctggcttgtgggaagagcagcatcattgtggcagccgatgagagcaccatcagctggggcccatcaccgacctttggggaactgggctacagggatcacaagcccaagtcttccactgcagcccaggaggtgaagactctgcatggcattttctcagagccggtcgccatgggctactcacactccttggtgatagcaagagatgaaagtgaaactgagaaagaaaagatcaagaaactgccagaatacagcccccaaaccctctgatgctccagagactcctccgactccacacctctcatggcagctgcatttccatgtgcactgggaccggaaagtcaaacnaggaatttaaaaaagccaaagtggacccaaaggtgcctttttatttaaacttcctganggtncggtttaccagtgatccaacggtnactacctttttttctggttgctttccaaagaccctttttttctcttaatggccaaataaaaaacctgnttcgaantggcntaacanttctaccaagaggccnaaaccttttaccattaagggggttttttcttcttctntctgaaacccttnccaaaaactcntttccgtttaatnnntnngg

SEQ ID NO: 666 - DNA, 349 bp, Homo sapiens
gcggcggcgggggaagcagcgtgagcagccggaggatcgcggagtcccaatgaaacgggcagccatggccctccacagcccgcagtatatttttggagattttagccctgatgaattcaatcaattctttgtgactcctcgatcttcagttgagcttcctccatacagtggaacagttctgtgtggcacacaggctgtggataaactacctgatggacaagaatatcagagaattgagtttggtgtcgatgaagtcattgaacccagtgacactttgccgagaacccccagctacagtatttcaagcacacttgaaccctcagcccctgaatttattctcggttgtacc

SEQ ID NO: 667 - DNA, 768 bp, Homo sapiens
  misc_feature (1)...(768): n = A,T,C or G
ggtggcgaggtggaggcccaggactctgaccctgcccctgccttcagcaaggcccccggcagcgccggccactacgaactgccgtgggttgaaaaatataggccagtaaagctgaatgaaattgtcgggaatgaagacaccgtgagcaggctagaggtctttgcaagggaaggaaatgtgcccaacatcatcattgcgggccctccaggaaccggcaagaccacaagcattctgtgcttggcccgggccctgctgggcccagcactcaaagatgccatgttggaactcaatgcttcaaatgacaggggcattgacgttgtgaggaataaaattaaaatgtttgctcaacaaaaagtcactcttccaaaggcccgacataagatcatcattcttggatgaaacaagaacagcattgacccgacggagcccaagcaagccnttgaaggaagaacccatgggaaaatctacttttaaaaaccacttcgntttcgnccctttgcnttggaaatggcttttnggattaagaaacaattngaagccccaatttaantnccccgcttggggccaatcccnttccnggtaaccttggncccngggccnggcccggtttcnaaaangggccnaaaatttccaagcaccactttgggnngggncccgntnncttaanggggatcccaaactttgggnaccccannccttgnggcgnaaaancaatgggccataaannggggttcccctggggngnaaaaatgggnattncccccncnc

SEQ ID NO: 668 - DNA, 659 bp, Homo sapiens
  misc_feature (1)...(659): n = A,T,C or G
ggtacagtatcctctccagacatttgcaattggcatggaagacagccccgatttactggctgctagaaaggtggcagatcatattggaagtgaacattatgaagtcctttttaactctgaggaaggcattcaggctctggatgaagtcatattttccttggaaacttatgacattacaacagttcgtgcttcagtaggtatgtatttaatttccaagtatattcggaagaacacagatagcgtggtgatcttctctggagaaggatcagatgaacttacgcagggttacatatattttcacaaggctccttctcctgaaaaagccgaggaggagaagtgagaggcttctgagggaactctatttggttgatgttctccgcgcagatcgaactactgctgcccatggtcttgaactgagaagtccatttctagaacatcgantttcttnctaatacttggctttgccccagaaatgagaaattccaagaatgggatngaaaaacattttctgaganaaaccntttgaggattccaatctgataccaaagagaatctttggcgaccaaanaaaccttnatgatnggaaaccttngntaaaaatnctggttaaaattnnnggaatccttnacttngggtnataatccnganggcaaannccc

SEQ ID NO: 669 - DNA, 409 bp, Homo sapiens
  misc_feature (1)...(409): n = A,T,C or G
acgtgccgcggaaatgctccgctagcaatcgcatcatcggtgccaaggaccacgcatccatccagatgaacgtggccgaggttgacaaggtcacaggcaggtttaatggccagtttaaaacttatgctatctgcggggccattcgtaggatgggtgagtcagatgattccattctccgattggccaaggccgatggcatcgtctcaaagtaaggttgggggctcacatttgggcagagtgagtggactaggactgctccagaggcgtggtcttaacgttgtccttttcccctggttctaggaacttttgactggagagaatcacagatgtggaatatttgtcataaataaataatgaanaaaaaannnnnnnnnnnaaaaaaaaaaacttgtcctcggccggaccacgc

SEQ ID NO: 670 - DNA, 741 bp, Homo sapiens
  misc_feature (1)...(741): n = A,T,C or G
accgctgtaagactgccaagaagtcagaggaggagattgactttcttcgttccaatcccaaaatctggaatgttcatagtgtcctcaatgtccttcattccctggtagacaaatccaacatcaaccgacagttggaggtatacacaagcggaggtgaccctgagagtgtggctggggagtatgggcggcactccctctacaaaatgcttggttacttcagcctggtcgggcttctccgcctgcactccctgttaggagattactaccaggccatcaaggtgctggagaacatcgaactgaacaagaagagtatgtattcccgtgtgccagaatgccaggtcaccacatactattatgttggggtttgcatatttgatgatgcgtcgttaccaggatgccatcgggtcttcgccaacatcctnctctacatccagaggaccnagaagcatgttncagaaggacccacgtacctttggccgngaccacgcctaagggccaaaattncaacacactggccnggncggttacctaagtggaatccnaaccttcggnanccaaagctttggccgtnaatccatngggccataagcttggttccctgggggggaaaattggtaatnccggttcacnaatttccccaccaacnttccnaaacccggnaagcctttaaagnggtnaaaaccntgggggtggccnnaaaggggggggacctnaacttncatttaaatnggggttggccnc

SEQ ID NO: 671 - DNA, 699 bp, Homo sapiens
  misc_feature (1)...(699): n = A,T,C or G
ggtacagcaggaattacaactactacctcaccgagaactcctccaccactgactgttcaggatcccttatgtcctgcagtttgtcccttagaagaattatctccagatagtattgatgcacatacgtttgattttgaaactattccccatccaaacatagaacagactattcaccaagtttctttagacttggattcattagcagaaagtcctgaatcagattttatgtctgctgtgaatgagtttgtaatagaagaaaatttgtcgtctcctaatcctataagtgatccacaaagcccagaaatgatgggtggaatcactttattcatcagttatcaatgcgatagacagtagacgaatgcagggatcaaatgtatgtggtaaggagggattttggagatcatacttctctgaatgtccagttggaaagatgtagagttgttgcccaagactctcacttcagtataccaaccattaaggaagaccttggcacttttagaaccattgtacctggcccggccggccggttcnaaanggccgaanttccagcacacttggcnggccgttacttagtgggattccgagcttcgggacccaagcnttggcggtaatcatngggccatagctggttcccngngtgnaaattggtattccggttaccaattccccaccacnnttccancccggnaaccntaaagt

SEQ ID NO: 672 - DNA, 377 bp, Homo sapiens
  misc_feature (1)...(377): n = A,T,C or G
actgaagctgaaatgcaggaagtggtggcaaaggtttattccagagaagccaggaagccggtcatcacccagcctctgagagcagttactggggtcacccaacctgacttcctctgccactccccgctgtgtgactttgggcaagccaagtgccctctctgaacctcagtttcctcatctgcaaaatgggaacaatgacgtgcctacctcttagacatgttgtgaggagactatgatataacatgtgtatgtaaatcttcatgtgattgtcatgtaaggcttaacacagtgggtggtgagttctgactaaaggttacctgttgtcgtgatctgaaaaaaaaaannnnnaaaaaaaaaaacctnggccgnnaccacgc

SEQ ID NO: 673 - DNA, 650 bp, Homo sapiens
  misc_feature (1)...(650): n = A,T,C or G
cgaggtacttgattggaccagatggtgagtttctagattattttggccagaacaagaggaagggagaaatagctgcttcaattgccacacacatgaggccatacagaaaaaagagctagccaaagcagtgttgctggatgcagtattctcttgctaagaggaaggaaactgtctcgcataggagcctatataaatataaacatatatacgtgcactctacagaatggccttcataccatgagaacatttctgttttggatggggatgttacccttgcgttcaaccaaaattgattcttggaactgtaaagattacaacccaaagtctcccaggaagctgtggggagaccagaggatcaagctgaagtgaaaccagtgaaaaacccacctgtggaaggcatggcggggccaggcacaccagtgcattcctgcctgcgaacaggcctccacaactttgccgcttttcatcgcttgggcccttgctaaatagctgtgggactgaattcacagaaaagaatntatttccataggctcttgctggctcttcttgagtctttntctttgagtcttggnggctataccgncgaatagggcttggcattanagtgatgcttgaactttagttcctataangattnctntcgattgcta

SEQ ID NO: 674 - DNA, 705 bp, Homo sapiens
  misc_feature (1)...(705): n = A,T,C or G
ggtacaagctttttttttttttttttttttggtgaaaagatatatatatatatatattcagaattaggcagctggactcagtttagatgatcccaattttgttggcaacatccaaagcatcgtaatcaggagccagtcgaacatatgccttcttctctccatcaggccgaatcagggtgttgaccttggccacatcaatgtcatacagcttcttcacagcctgtttaatctggtgcttgttggctttaacatccacaatgaacacaagtgtgttgttgtcttctatcttcttcatggcagactcagtggtcagcggaaacttgatgatagcatagtggtcaagcttgtttctcctgggagcgctcttccgaggatatttgggctgtctccggagtcgcagtgtcttcggccgcccgaaggnggggtgacgtgccggatcttcttctttttggggctgtggaccacctttcaacactgcctttttgggccnttnaaagcccttngctttggctttagcttttaggaaggggccaggaaccttnccttnttcgcttttcggaacctgccccggccgggccgttcnaaaagggcnnaatttccaacncacttggcngggccgntactaaggggatnccaanctttggnanccaanctttggcgnaaancttggggcnataactggnttcccggngngnaaaaatgntt

SEQ ID NO: 675 - DNA, 622 bp, Homo sapiens
  misc_feature (1)...(622): n = A,T,C or G
ggtaccctaattttccttgcacccatgcctgtccaatcagatgactctgggaaacgccaaacaggctgaatcaatgtctttgtgtggtttttttcttccagattgtttttttctcacctataaaaggatctatctttaaaaataaactgtattaaatctgtaacatcaaaggcagaaggtttgtgtgtgtgtgtgtgtgtgtgtgtgtatctgtgtgtttaaatcaaggggagattgcatttataaatcatactggccttatgaacatcctctgcaataaatatactttttagccttaactataaattatatattttagtgtttaaaaaccttccggtgtgaaacatctaagataacccttaaaaaccacctgttctctaggtaaacctctgaggtccctactttcaaacaccagttggcaccaaaggattcctaaacttcaacttctttaaagaaaagaaaggaacttatcatctggcatgtgagaatgcaaccttttctcttnctgcacgcagctncaacacccactcatgcacacagtggccaccttgctaaagtctgttgaacagcctgcggcgcgtcaagngatcaccactgcgcgtctatgaccactcgacactgc

SEQ ID NO: 676 - DNA, 620 bp, Homo sapiens
  misc_feature (1)...(620): n = A,T,C or G
cgaggtgcacaggcaccactaataatcagacctgattctggaaaccctcttgacactgtgttaaaggttttggagattttaggtaagaagtttcctgttactgagaactcaaagggttacaagttgctgccaccttatcttagagttattcaaggggatggagtagatattaataccttacaagagattgtagaaggcatgaaacaaaaaatgtggagtattgaaaatattgccttcggttctggtggaggtttgctacagaagttggcaagagatctcttgaattgttccttcaagtgtagctatgttgtaactaatggccttgggattaacgtcttcaaggacccagttgctgatcccaacaaaaggtccaaaaagggccgattatctttacataggacgccagcagggaatttggtacactggaagaaggaaaaggagaccttgaggaatatggtcaggatctcttcatctgcttcagaatggcangtgacaaaagctatctttgtaaaaaaaaaaaaaaaacctgccgccgncgtcaangccaattcaccctgcggcgtctatgaccactgnccactgcnatntgctactgtnctgggaatgatcgtncatcncan

SEQ ID NO: 677 - DNA, 691 bp, Homo sapiens
  misc_feature (1)...(691): n = A,T,C or G
cgaggtactgggtccaaatgctggagaagttacacaaggctttgcagctgcgctcaaatgtggactgaccaaaaagcagctggacagcacaattggaatccaccctgtctgtgcagaggtattcacaacattgtctgtgaccaagcgctctggggcaagcatcctccaggctggctgctgaggttaagccccagtgtggatgctgttgccaagactgcaaaccactggctcgtttccgtgcccaaatccaaggcgaagttttctagagggttcttgggctcttggcacctgcgtgtcctgtgcttaccacccgccaagcccccttggatctcttggataggagttggtgaatagaagcaggcagcatcacactggggtcactgacagacttgaactgacattttggcaaggcatcgaaaggatgtattccatgaagtcaccagtcttaaacccatgtggtaagccggtgatggaaccactgtnaaatcaattttaacatgaacctttcntgnggatttcttaatctcggtgcaagtttttaagggtgaatttttctttttctncatgggggtaatgattttnagatgaaaacctttccagttgatttttgtccaaancaatnatggttaaatatccctccagggnnttttncttgaaggaaattggtnctttgaggttttagcttnccgga

SEQ ID NO: 678 - DNA, 667 bp, Homo sapiens
  misc_feature (1)...(667): n = A,T,C or G
cgaggtacttgattggaccagatggtgagtttctagattattttggccagaacaagaggaangggagaaatagctgcttcaattgccacacacatgaggccatacagaaaaaagagctagccaaagcagtgttgctggatgcagtattctcttgctaagaggaaggaaactgtctcgcataggagcctatataaatataaacatatatacgtgcactctacagaatggccttcataccatgagaacatttctgttttggatggggatgttacccttgcgttcaaccaaaattgattcttggaactgtaaagattacaacccaaagtctcccaggaagctgtggggagaccagaggatcaagctgaagtgaaaccagtgaagagcccacctgtggaaaggacatggcggggcgaggcacaancagtgcattcctgcctgcgaacagncctncacactttgccgctttcatcgcttgggccttggtaaatactgtggactgaatttccagaaaagaatntatttcataggntcttnttgctttcttgagtcttgtctttgagtcttggggntaanacagtcnaatanggctttgcnttcaagtgancttgaacctaagttcctntaanganatcctttcnatgctatgaaaggaattttgttnggggaa

SEQ ID NO: 679 - DNA, 302 bp, Homo sapiens
  misc_feature (1)...(302): n = A,T,C or G
cgaggtactgatggggaagtgccggcgcttcttggatgaactagatgcggttcagatggactgagcttggatgcttctgaggcaagctgaagctttgggttctgactgacccaccctacaggactgctgaacagagagcccagtgtgactagggatcctgagttttctgggacaattccagctttaatcaatacattttgttaaatgtgccataaaatgagactttttacgcctttataaggccttagatgtaaataaactcacccaaacaaaaaaaaaaaaaanaaaaaaaaaaagcttgt

SEQ ID NO: 680 - DNA, 649 bp, Homo sapiens
  misc_feature (1)...(649): n = A,T,C or G
ggtacgtgctcaggaaattaaaaacaaaaatcaaggaattgaacaacacatgtgaacccgttgtaacacaaccgaaaccaaaaattgaatcacccaaactggaaagaactccaaatggcccaaatattgataaaaaggaagaagatttagaagacaaaaacaattttggtgctgaacctccacatcagaatggtgaatgttaccctaatgagaaaaattctgttaatatggacttggactagataaccttaaattggcctattccttcaattaataaaatatttttgccatagtatgtgactctacataacatactgaaactatttatattttcttttttaaggatatttagaaattttgtgtattatatggaaaaagaaaaaaagcttaagtctgtagtctttatgatcctaaaagggaaaattgccttggtaactttcagattcctgtggaattgtgaattcatactaagctttctgggcagtctcaccatttgcatactgaggatgaaactgactttggcntttggagaaaaaaactgtcctgccggcggccgtcaaaggcaattcaccctgcggcgtntanggaccactnggaccactgggaantggctactgtcctggaatgtnccgtccatcccaatcaccgg

SEQ ID NO: 681 - DNA, 722 bp, Homo sapiens
  misc_feature (1)...(722): n = A,T,C or G
cgaggtaccaccagagggaaagctggggcggagggatttgttcgtgttgacccgagattatgtgctgaagtctgcagagctggcaaaagctggagggtgcaaacatttcaacttgctatcctctaaaggagctgataaatcaagcaattttttatatctacaagttaagggagaagtagaagccaaggttgaagaattaaaatttgatcgttactctgtatttaggcctggagttctgttatgtgataggcaagaatctcgcccaggtgaatggctggttagaaagttctttggctccttaccagactcttgggccagtgggcattctgtgcctgtggtgacccgtgggttagagcaatgctgaacaatgtgggtgagaccaagagacaagcagatggaactgctggagaacaaggccatccatgacctggggaaaagcgcatggctctntnaagccatgacccccattggagaaatgggttttattggcaacccttacacccattacccaaatcngnaatttcanggtctaaaaaaaagtcancctggtttaactttggngggttactaatccttaggcttcanttccaatcaggaaatgatggggcctntggattaaggggttcaaaacccgggtttccctttgganncttcggggncntttggnaaaataaaaatttgnnnccctnttttaacttgaatnaaaatttnggggggggccn

SEQ ID NO: 682 - DNA, 530 bp, Homo sapiens
ggtacttgcctttagtttatcaggggatgtgtaaggagcttcaggagcataaatcctgaaaatatcagcaaggcagcaggctaccagtaagcgaacatccttatcaggatgcttgaggaaaaaatctgaagcaagatgtaaagctaggtttaaataaagctccttttcttcttcagagtcctggtccatatccataaaagttttcacaaccatctatacaaaaataaaaaatcaaataatgaaatgctccatgtaaaactacagtcatgtgaaataaaggtcatgttaattgctaaggttaacttcaaatgaatatactttcatttttctgcagaaagtctctatttgagagaacacaattctcctaaaactacaaagtaaacttctatttaaaagacttactaaaatattttttcatttacccaaaatatctgctaaccagatttttaaagattaaattgcccttatgtagtagtcattattggaagaattccaatagaatatttgtggaaacttctggtctcacttgt

SEQ ID NO: 683 - DNA, 745 bp, Homo sapiens
  misc_feature (1)...(745): n = A,T,C or G
ggtacctgtctttccttattccctcatccttagtggatcatttgtatctcctgccttatgagaaccttttgacagaagatgagacaaccatatctgatgatgtggatatcgctcgggatgtcatatgtcttataaaatgcctccggctgattgaagagtcagtaactgtggatatgtcagttataatggaaatgagttgttataacctacagtctccggaaaaggctgcagagcagattctggaagatatgatcactattgatgtagaaaatgtgatggaggatatttgtagtaaactgcaagagattaggaacccaatccatgcaattggactacttatacgggaaatggattatgaaacagaagtggaaatggaaaagggattcaatccagctcacctttgaatattcgaatgaatcttacccagctctatggtagtaacacagcagggtatattgtgtgccagangggtgcattaaaatccgccagtacctgcccnggccggccgntcgaaanggccnaatttccacacactgggcgggccgttactanggggaatcccaagctttggganccaagcnttggncgtaatcatgggccataanctnggtnccctgggnngaaaatnggtaatccggttaacaattnccccnccaactttcccnacccggnaacccttaaaggggtaaaaaccctgggggggncccaaagggagggggccttaaccttcccctttaaattggcn

SEQ ID NO: 684 - DNA, 628 bp, Homo sapiens
  misc_feature (1)...(628): n = A,T,C or G
ggttggagacccgagaaccggaggctggagagcaaaatccgggagcacttggagaagaagggaccccaggtcagagactggagccattacttcaagatcatcgaggacctgagggctcagaccttcgcaaatactgtggacaatgcccgcatcgttctgcagattgacaatgcccgtcttgctgctgatgactttagagtcaagtatgagacagagctggccatgcgccagtctgtggagaacgacatccatgggctccgcaaggtcattgatgacaccaatatcacacgactgcagctggagacagagatcgaggctctcaaggaggagctgctcttcatgaagaagaaccacgaagaggaagtaaaaggcctacaagcccagattgccagctctgggttgaccgtggaggtagatgcccccaaatctnaggacctcgcaagatcatggcagacattccggcccaatatgacaactggctcggaagaaccnagangactngacaagtccttgccggccgncgtcnaaggcaattcaccactgnggcgtctatgatccactgnncactgggantgctactgtctggaatgttcgtnatcccactcacgactagnactggctagggata

SEQ ID NO: 685 - DNA, 758 bp, Homo sapiens
  misc_feature (1)...(758): n = A,T,C or G
gcgtgggtcgcggcccgaggtacggagcaaatgttttatttaataagttataagatacaatttacagtcggcgtttgattccagtttnggcttccgtggtccaacttaacacaccccgtgggcccttcacaataagcttccggctggtccactttctgtangggtgggcttttaccccaacactngcccagatctacacctgccacaagantggccactttctnaggactaagcagcaaaacctaaaggnctgcctgccagaccacactacacatttgggctcaggcaacgtccctgacactttaacctcattccaaagccagctcaggtctgcaggaaggcaggcaaaattccctacacctcatttctggatttctgcaccacacagntctnactggttctgcccatggtgaaaagaccccaataagctgntggccttntttccccaaccattcccaactttnagggccaaganccccaagaggttcaatctggcctgctggacctggccggcnggccgntnnaaanggccaaantccancacaattgggnggncggtactaaaggggaacccaacttngggnccaaactttggggnaaacatggggnnnaanngggnnccnggggngnaaaatngnnancccntttccaaattncccnccaanntttnnaacccggaaaccttaaangggnaaaancccgggggggcccaaaggggggggccnannnncccnttaaanggggnngggcccccccnn

SEQ ID NO: 686 - DNA, 697 bp, Homo sapiens
  misc_feature (1)...(697): n = A,T,C or G
ggtacagattgggcggaatgtggagaaggttggccacagtccagagccaggagcccatggaacaacttggaaggtgactcaggtgaggctgtcaatgagggaatcccgcatgctggtggcaatggtgctaggctgggcttcattcagcttgaagacactctccaccactgacagctctgtgctggttgtgtccaggccacagaaggcacaccagtcattcaccaccatcccagcagcaatcacctcactgcctcggttcacagtccccgccacaagggggacttgaagaagagaggacagctcatcctggtcttcaattgaagtcttgggatgcaccagccctccctgattgctgaagacacagtagcttcctactagcacctggtcggccactgctgtctgaagacttccaccttgagcacatctgccagaatttcttctgnctcctgtccaagtctgggtggaccaaggncacgtagtcatttcaagtggtgacattgcccaaggcttaaaaccgttcttcaaccgnctaatctgcacttggtctgggaaggttgttgccaatgtgtgcaacttctggggccgnggtattgtngggaccttgcccggccggccgttcaaagggcaattccanccaatgggggccgtactangggaaccancttgggnccaacttggggnaanatgggcnnaacgn

SEQ ID NO: 687 - DNA, 668 bp, Homo sapiens
  misc_feature (1)...(668): n = A,T,C or G
acataataacctcatcaactaacttttaaattaactgaatggctattatgtatttattactcaataccagtccattacctaatataagagcactaagagtatttaatcattacctattttaatttattttataggtgaaaaacactgatgtcaagttaggttgaggaacttatattcaaggtcctccagctaactgtcgacacaacaatgactagaactaattgtcaggtctcctgataattagtccactgttctttctattctaccataaggttgttaggatgaagaatactgcagttttactgcataaatattctgaagtcagacttactctaaggcattcttccttcagaatacaggctaaagcagaattttacaagctactgcttctttttttttttttttttttaataaacacagaacattttgntcaaaccaaatctaactcagaagtgnaaataatgnaagccaatcactattaaaaggcngaatttcctaaagggaaaantaccatttaaccaacctttctaaagtaaacatcctttccangggactggggatttagncttacacttgaaggcttcctgggacctgggcggnacccttanggcnattcanccatgggggcggtctanggnnccacttgggccannttggnnaattnggcn

SEQ ID NO: 688 - DNA, 375 bp, Homo sapiens
acatcaattcagtgagaaaaggtgtgtagggagccataagtctgcaaagagaaagcagaacactaaacaaggtttctagggccatgacacaatcctccatcccattttcaccctttaatcttctgcggttcattctaacataccaattggtcagaatatctacaaacttgaccaggcgaggcaccacagtataaagcctataagctgccatttcagtctcaaagaagccaatgagagactgcatgaaggacaggatccaccggtctgtaatgttggggctttctctaaccgtgttctcattgtagagaaattctatttcttcctccttctggagcctcagaacgttctggattaagaagcgataggcattgtacc

SEQ ID NO: 689 - DNA, 582 bp, Homo sapiens
  misc_feature (1)...(582): n = A,T,C or G
ggtaccaaaagttaaatgacttacctgggctgtttagaaactctctacctagaaagatttccattaccgtcagatgttaggagaggatctaacataggaaaggtcaccagttgtcacagaaaaagccaaagaacttaggtctagtgcccctttgccactgacaaactaataacaccctctagacatcctcaagtccttctccttgctcaggaattttcttctaccaggtcttttctaccaacttctctgtataactacatcttactcatctttcaaagcccgactcagttgccccttccatctagaaaactttccagaccaaactatcccagcacatggttatgatctctcaaacctctgtgtttccccatccctgttgcccgttaaattctgccacaagctcagaccgactctctatttggcttatttgtgtctaatccattgagttctcctccaaagcagagatcatgcttcactcatttctgcatctncaggaccttatgaatgaatgaatgtgtgaattataaggattactaaagccncagggcctgactcaaagccaggaccctagtaggngcttgg

SEQ ID NO: 690 - DNA, 812 bp, Homo sapiens
  misc_feature (1)...(812): n = A,T,C or G
actaaagcggatgggaatgtcgtttggcctggagtcaggcaaatgctctctggaggatctgaaacttgcgaaatccctggtgccaaaggctttagaaggttatatcacagatatctccacaggaccttcttggttaaatcagggactacttctgaactctacccaatcagtttcaaatttagacctgaccactggtgccaccttaccccagtcaagtgtaaaccaagggttatgcttggatgcagaagtggccttaacaactgggcagttcctggccccaaacagtcaccagtccagcagtgcggnctntnactgnttcgagtcccgaagcgaagaccccctggtcgttcaatgatgaanatgaaggaanatgatgaaggagggattccctncttcccaagaattaaagaccangaagaaagccctaccttttcaaatatggtgaatgcctcaatggtgtggtttggtaantgggtgaagcctcnttgggttttttgaaaatggaattggctttcaagtccttttggccctttgggtttggcacttggggngggttcaannggaaaaanctttngnggaaaacnccccatttaggcccaaattcnccattgaaanggctttgaaaaatgnatttggnaaattgnaaaaggttnaacccttaangggggnaattgnaaaantnttgggcccaaccngaaccccnttnnaangggnttttnccccaannaaaagcctggcnttttttgaggggaaaaaannggggggataaanccccttaaaaaaatttgcccnnntnnaagngccaccntttt

SEQ ID NO: 691 - DNA, 691 bp, Homo sapiens
  misc_feature (1)...(691): n = A,T,C or G
acctactataatacagtagctaacatgtattgagcacagattttttttggtaaaactgtgaggagctaggatatatacttggtgaaacaaaccagtatgttccctgttctcttgagcttcgactcttctgtgctctattgctgcgcactgctttttctacaggcattacatcaactcctaaggggtcctctgggattagttaagcagctattaaatcacccgaagacactaatttacagaagacacaactccttccccagtgatcactgtcataaccagtgctctaccgtatcccatcactgaggactgatgttgactgacatcattttatcgtaataaacatgtggctctattagctgcaagctttaccaagtaattggcatgacatctgagcacagaaattaaggnaaaaaaccaaagcaaaacaaatacatgggctgaaantaacttgatgccaagcccaaggcactgatttctgggnatttgaacttanggcaaatcagagctacacagacgcctacagaaggttcaggaagangcagaagccttcaatttgaaagaaatttattggcaccaaagtaagggccggatnaacctttaggcntttttanggagggccttttaaaaaggntccttggccggaacncnttanggngaattccanccntgggggccgtattaagggacccgn

SEQ ID NO: 692 - DNA, 271 bp, Homo sapiens
cgaggtactgctgctaccactggaagcgctgcgcctctttcgggttttgtcccggccgcgatccttctcactcgactccttggtggcccctttatcttttgagcgatccttggacttctcatctgagcggtctttgcgtttggtaggtgaaggagccctagtgctggactttttattatgagaaacgatccctaatcgattgcaatttacgccgaagagcagcatcttccctccgccgccacctcctcctgctttcctcagccgccgaggc

SEQ ID NO: 693 - DNA, 730 bp, Homo sapiens
  misc_feature (1)...(730): n = A,T,C or G
cgaggtttttttttgccgcacatgaaacattattttaattggtttaaagtccctttataaagagtgctacatggtttagataaaggaaacatataactattgagttacaggggattttattaattataaaatgcaatcaatttaaattacgtaggtttaagactagtcccttggataagccccaagcgaatttgtcttcagattattaaaattagtgctgtaaatcagggtgggcaattcacagcctttctgaactgactgaactagagcttgcagtgaagtgttctgctgagactgagcaccttacagatatttttctccagaagatggtgctgggtaataaaatcatcacaattaggggaatggttaagtggtctctactgnggcaaatgccaactgntggaattcactttattgtagaaaaacccaaactgagactcttaagttttggttaacaatgnggttctgggatgaaaccaactactggggcactgnccaggtaggaaaccattctttcactggggtttcagcataaatgggaactggatgttnaaaggcngggaattaaccctttttaggccaaaagaaaaagcttaantggggntttaccaangggntccctggggcttaaattcaannntgggncctacanngnccnnaanccctggntaaacccggattaaccctttaacctgggaacccaacctttaaanggggggttttaaaaggg

SEQ ID NO: 694 - DNA, 700 bp, Homo sapiens
  misc_feature (1)...(700): n = A,T,C or G
cgaggttacaaaccacaaagacattggaacactatacctattattcggcgcatgagctggagtcctaggcacagctctaagcctccttattcgagccgagctgggccagccaggcaaccttctaggtaacgaccacatctacaacgttatcgtcacagcccatgcatttgtaataatcttcttcatagtaatacccatcataatcggaggctttggcaactgactagttcccctaataatcggtgcccccgatatggcgtttccccgcataaacaacataagcttctgactcttacctccctctctcctactcctgctcgcatctgctatagtggaggccggagcaggaacaggttgaacagtctaccctcccttacagggaactactccaccctggagccttcgtagacacaccttggagttttttcgaaatatgggttgggtttttgggctctttgggtgaattaaaataaaatttaaatgccttcacgctgngataggtgccacatgaactaccgagnttcngaaaaagaagggagaactgacacttcttanngnttgcagactnttaangggcccttaggactantngggcttttgggggtaaaaggtncccttnaagaancccngnacctggccnggggggcgttnaaanggggaattcnanccnctgggggccgtactaaggggacccactnng

SEQ ID NO: 695 - DNA, 690 bp, Homo sapiens
  misc_feature (1)...(690): n = A,T,C or G
ggtacagatggcactgacaatcccctttctggtggggatcagtatcagaacatcacagtgcacagacatctgatgctaccagattttgatttgctggaggacattgaaagcaaaatccaaccaggttctcaacaggctgacttcctggatgcactaatcgtgagcatggatgtgattcaacatgaaacaataggaaagaagtttgagaagaggcatattgaaatattcactgacctcagcagccgattcagcaaaagtcagctggatattataattcatagcttgaagaaatgtgacatctccctgcaattcttcttgcctttctcacttggcaaggaagatggaagtggggacagaggagatggcccctttcgcttaggtggccatgggccttcctttccactaaaaggaattacncgaacagcaaaaagaaggtcttgagatagtgaaaatggtgatgatatctttagaaggtgaagatgggttggatgaaatttattcattcatgagagtctgagaaaactgngccgtcttcaagaaaattgagaggcttccattcacttggncctgccgactgaccatggctccaattggctataaggttgcagcctttaatcgatttncngggnagggttaaaagcttggnccgttgggttccaaacctaaaaaaaannnnnnnnaaaaaanant

SEQ ID NO: 696 - DNA, 688 bp, Homo sapiens
  misc_feature (1)...(688): n = A,T,C or G
ggtacagaaatgaggcgtcgcagaatagaggtcaatgtggagctgagggaaagctaagaaggatgaccagatgctgaagaggagaaatgtaagctcatttcctgatgatgctacttctccgctgcaggaaaaccgcaacaaccagggcactgtaaattggtctgttgatgacattgtcaaaggcataaatagcagcaatgtggaaaatcagctccaagctactcaagctgccaggaaactactttccagagaaaaacagccccccatagacaacataatccgggctggtttgattccgaaatttgtgtccttcttgggcagaactgattgtagtcccattcagtttgaatctgcttgggcactcactaacattgcttctgggacatcagaacaaaccaaggctgtggtagatggaggtgccatcccagcattcatttctctggtggcatctccccatgctcacatnagtgaacaagctgtctgggctctaggaaacattgcaggtgatggcttcaatggtnccagacttgggtanttaagacctggccggccggccgttcaaaaggccaantccacaccttggcggccgtctannggatccaactnggaccaacttggggnaacatggcaaactggttcttggggaaatggttccgttccaattccccaatttcaccgaggctaaagg

SEQ ID NO: 697 - DNA, 732 bp, Homo sapiens
  misc_feature (1)...(732): n = A,T,C or G
gcgggtcgcggccgaggtactcccgattgaagcccccattcgtataataattacatcacaagacgtcttgcactcatgagctgtccccacattaggcttaaaaacagatgcaattcccggacgtctaaaccaaaccactttcaccgctacacgaccgggggtatactacggtcaatgctctgaaatctgtggagcaaaccacagtttcatgcccatcgtcctagaattaattcccctaaaaatctttgaaatagggcccgtatttaccctatagcaccccctctaccccctctagagccaaaaaaaaaaaaaaaaaaaaaaaaaaaagcttgtaccatctcccagtcctggaggctggccatgtgagacccaggtattgcagggctggttgcttctgaggctgaggtgtgtcccgtcttgctccaggcccttcccagctggtcttctccctacatttgcagacngatggccatccgaagntgacatcatctcctttggggctggctctgggnccattgggaattaatggtttanagacngaattcactggggtgcttaagcttgggcttcaaaccggtaggnttaaacnnnnttnctttcttagccttccaagtaactngatnccnggcttaancccctgggcccancccaaagttcccccttttttaangggcctctttttaatngggttaaggnccnctggaaggattcntnttaactnggaaancntna

SEQ ID NO: 698 - DNA, 651 bp, Homo sapiens
  misc_feature (1)...(651): n = A,T,C or G
cgaggtgccacgtaatgtcccgtagttcgctcatcccgtccatgccagatggattgtggggaaggtgattgggacaaaaatgcaaaagactgctaaagtgagagtgaccaggcttgttctggatccctatttattaaagtattttaataagcggaaaacctactttgctcacgatgcccttcagcagtgcacagttggggatattgtgcttctcagagctttacctgttccacgagcaaagcatgtgaaacatgaactggctgagatcgttttcaaagttggaaaagtcatagatccagtgacaggaaagccctgtgctggaactacctacctggagagtcccgttgagttcggaaaccacccagctaagcaaaaatctggaagaactcaatatctcttcagcacagtgaagcgggagtggaagaaggatctaaagggaaaaactgacatgtttatgttatggaaaaagaaattttctaagttcatcacaactgngtcagttcttgngngttatgaatactaaaccaatgaataanggctactatggttttacaaaaaaannnaataaaaanaactgnctgccggggcgtnaaggnaatnaccatgngcgtntntggnncacttggccacntgggannggcnantgtctgg

SEQ ID NO: 699 - DNA, 709 bp, Homo sapiens
  misc_feature (1)...(709): n = A,T,C or G
actgtagcatattaataccctgtgaactgcaaaaaaccaaatacatttacagtagtattggtcaccaaaatagaggggaaactttacaattgtgagaatgtgtaaatgttctcattaaggcagtattgacccagacaaccatttagtattcatctatcccctcaatgcctcataattctggaatgcctgttgtgaaacatgtcagtgcacagtgtctcctaaattctcacacgtgcttgattttctgattcatctggtgaactgggagtaggaagttggtcatagacaatatgccctccttctcttgtctgaccaaagcttgaagcaatcacatctactgccaggttagctgtagtcttcgcctcttcctctgaggtggccaactgaggattgacttcaacaagatccagtgctgatagcaaccctgnattgggtattcctcagcaatatacatgccttctcgatanggtaagtcccccgacacaggagttnctgtggcttggagcccgtgtaggggcaaatgcntnaatatcnaaacttcaaatggaatgggcttttggctcttgccaatcancngaaccaaangttcgntccctgaaccntttggaaacccagttnattcaanttntntcangggaaaaaacctgggaatcnaagncttttaaaaaaaaaggttcngangggncnccgtttttnaaccaaaaaaccc

SEQ ID NO: 700 - DNA, 656 bp, Homo sapiens
  misc_feature (1)...(656): n = A,T,C or G
ggtcagaacctaaaggtttcactgaatgcgaaatgacgaaatctagccctttgaaaataacattgtttttagaagaggacaaatccttaaaagtaacatcagacccaaaggttgagcagaaaattgaagtgatacgtgaaattgagatgagtgtggatgatgatgatatcaatagttcgaaagtaattaatgacctcttcagtgatgtcctagaggaaggtgaactagatatggagaagagccaagaggagatggatcaagcattagcagaaagcagcgaagaacaggaagatgcactgaatatctcctcaatgtctttacttgcaccattggcacaaacagttggtgtggtaagtccagagagtttagtgtccacacctagactggaattgaaagacaccagcagaagtgatgaaagtccaaaaccaggaaaattccaaagaactcgtgtcctcgagctgaatctggtgatagccttggtctgaagatcgtgacttctttacagcattgatgcatatagatctcaaagattnaagaacngaacgtcntcataagcagtgatgtccgaagganatgtcttaaactgntgaaaaatanccttcttgcagtattcaccgaaagcggactatccaatattcncnacgggtttactgcnn

SEQ ID NO: 701 - DNA, 716 bp, Homo sapiens
  misc_feature (1)...(716): n = A,T,C or G
ggtaccttgacagggacgagaggtcgaaggagttgccagccccatctttgaatgaacattcagtcagatcgaaaggtgggcaggcatactgcgttcgccactcaaacaagtaggaacaatctgaagtctcctttagaaatactggccgctgggtgccgcggtcacagtagaagaagatggctgtggagcgctgataaaccttatggcaagtgtcccccccgtgaagttcatttttaacaagccattttcataagttagcttctgagtcaggagacctgccactttgtgaaatccctgcggttcccgcttttcctgacatgaggagaccaccttggacttgncacttgtgggggcagacgtctgaggaaaagctttccacagaccccgaaagtaataaagtgtattcgccagcgctnacgaatggtgtcgttgaagcccaagggcttnangtcatacaagttgccatgcccttgggtctttcaccttacaagttgnccccnttcacttttgacaacgggaccaggctttcacaagttttccaantaacccgtaccttgcccnggccggccgttnnaaangggcnaattccanncacttggnggccgtactaaggggatcccaactttggacccaacttggngnaaanatngggcntaactggttccctggggnaaaatgtttcccgttcaaaattcccncnaantttgagccggaag

SEQ ID NO: 702 - DNA, 707 bp, Homo sapiens
  misc_feature (1)...(707): n = A,T,C or G
tgnatntgtcagcggcgcagtgtatggtatctgnagaattcgcctttcgagcggcgccgggcaggtactcatcttatactgaaagaacgtggtggctctaaatatgaagctgcaaagaagtggaatttacctgccgttactatagcttggctgttggagactgctagaacgggaaagagagcagacgaaagccattttctgattgaaaattcaactaaagaagaacgaagtttggaaacagaaataacaaatggaatcaatctaaattcagatactgcagagcatcctggcacacgcctgcaaactcacagaaaaaccgtcgttacacctttagatatgaaccgctttcagagtaaagctttccgtgctgtggtctcacaacatgccagacaggtcgcagcctcccagcagtaggacaaccacttcagaaggagccctcgttacacctggatacaccatcaaaattcctgtccaaggacaaactcttnaagccttcctttgatgtgaaggatgcacttgcagccttggaaacttcangacgtccagccacagaaaaggaaccgagtcctnggccgcgaccccctaaggcaattcacacactggcggcgtctagggaccacttgggccaacttgngaactggctactggtctgggaatgtnccgtacatccncaatnaccgactaagtaactgggctnngggctatcn

SEQ ID NO: 703 - DNA, 703 bp, Homo sapiens
  misc_feature (1)...(703): n = A,T,C or G
acctgccagaattagcaagagctttctttaagaagacatttgtcaaactcaacaaattgaaggttaacaccttaagagttgtagttactgaccagaaatatggacagacttcttagacttggaggaggtatgcctggactgggccaggggccacctacagatgctcctgcagtggacacagcagaacaagtctatatctcttccctggcactgttaaaaatgttaaaacatggccgtgctggagttccaatggaagttatgggtttgatgcttggagaatttgttgatgattataccgtcagagtgattgatgtgtttgctatgccacagtcaggaacaggtgtcagtgtggaggcagttgatccagtgttccaagctaaaatgttggatatgttgaacagacaggaaagcccgaaatggttggttggttggtatcacaagtcaccctggctttggttggtggctttctggtgtggatantcaacacttnagcagagcttttgaagccttttccggaaaanagctttggcantgggttgtggatccctttcanaatggtaaaaggaaaggttggtaattgatgccttcanaatggancaaggctaaatnaagggcttaggacttgaacccggacaanaantttaaattnggncccttaaacaagccttttntcnggctttattttggcttaccnnctttttnn

SEQ ID NO: 704 - DNA, 683 bp, Homo sapiens
  misc_feature (1)...(683): n = A,T,C or G
cgaggtactgagggataggagagtatatgggtttggcaccacagggtgggtaggcaaaacaatttggttgataaggctcagatcctgaactaacctgtaagggcttgtctggttcgaggacaggtgaaatgggggaattgtaagtagagtttataggctttaaaaggccatgctgtagcaggcgagtgataacaggctttaatctttttaaagcatgctgtgggatgggatattggcattgagcggggtaagggtgattaggttttaatgagatggtaaggggtccatgatcggtcaccaaggagggagtagaggtatcttatacttgtgggttaaggtggggggatacaagaggaggacgcanaggaggctttggattgggaaaaaagggcaccaatgagatgtaccntaatccaggaatagtcagggaaacnnatagttanttaaaagtgtctcggctaatangggactgggcagtggggatactaaaaaggatgcttaaaaagtatgnctaagttgcaccnnattnangagtttaaaaaggttaaaaacttgctggnaatcctancaccnttttggagcnagaaaacaggcccttnaaanaaggtatntgaatgggaaccccntnttaaaaggggcggcntaatttccctgnaaagtcttnaactntnnaaggccctacn

SEQ ID NO: 705 - DNA, 463 bp, Homo sapiens
ctgaaagtcgatgaaggacgcgattacctgcgataagcttcgtggagttggaaataaactatgatacggagatttccgaatggggtaacctaactgagcaaacctcagttgcattttgatgaatccatagtcaaattagcgagacacgttgcgaattgaaacatcttagtagcaacaggaaaagaaaataaataatgatttcgtcagtagtggcgagcgaaagcgaaagagcccaaacctgtaaaaaggggttgtaggacatcttacattgagttacaaaattttatgatagtagaagaagttggaaagcttcaacatagaaggtgatattcctgtatacgaaatcataaaatctcatagatgtatcctgagtagggcggggcaccgtgaaaccctgtctgaatctgccgggaccacccggtaaggctaaatactaatcagacaccgatagtgaactagtacc

SEQ ID NO: 706 - DNA, 651 bp, Homo sapiens
  misc_feature (1)...(651): n = A,T,C or G
actatagcatctgtggaaaatcttagaaaaaaacattttctcccccaccctctctcttccctgttaagaccatcccaaaatgcttcaagtaaaaaataacaagtttaaggggttaagcacttttaaagtctgattaagggggtggggggaaaaaagagtaactaccagccatttctccaatggacatctcttccacagacctcaacgtgagaactgctctagtttctataaactgtaaacctgtggtggtctgattatcctgatattggattttcttgttttctgttacaccttgagtcatttgcctttaggattctagacagacctaagggaaaaagaactgaaaacatattttgcccccacccccacaaaaaaaaatactgaaaactcccccccgcctcagttacacatccaaactctacatttacaaaacgaattcagggtgaggaagtaaaacaggtcatctattcacaaaactgaaatacttcattaccccaactaaacatacaaactgnttacagattgctgaaatggctcaatttggctatcaaattcatttgggtttcctcaaatcgngtaaaaaaaaaaaaaaaaaaagcttggncctnggccgnaacacncttangggcaaatccancccctgggnggccg

SEQ ID NO: 707 - DNA, 625 bp, Homo sapiens
  misc_feature (1)...(625): n = A,T,C or G
ggtggcggctcgggacggaggacgcgctagtgttcttctgtgtggcagttcagaatgatggatcaagctagatcagcattctctaacttgtttggtggagaaccattgtcatatacccggttcagcctggctcggcaagtagatggcgataacagtcatgtggagatgaaacttgctgtagatgaagaagaaaatgctgacaataacacaaaggccaatgtcacaaaaccaaaaaggtgtagtggaagtatctgctatgggactattgctgtgatcgtctttttcttgattggatttatgattggctacttgggctattgtaaaggggtagaaccaaaaactgagtgtgagagactggcaggaacccgagtctccagtgagggaggagccaggagaggacttcctgcacacgtcgcttatattgggatgacctgaagagaaagttgtcggagaaactggcagcacagacttcaccagcaccatcaagctgctgaatgaaaatcatatgtccctcgtgangctggatctcaaaagatgaaaatctgcttgatgttgaaatcaattcgtgaattaactcacaagttgcgtgacacatttgtaaatcngcaaacacntnaaactgggn

SEQ ID NO: 708 - DNA, 209 bp, Homo sapiens
actgttccatctggaagtcaagattggtgccacctaagtgggttcctgctgcaaggaacttaaggacatcctcctccttcatttgcaggacatcaagggctccggacattgtgaaagtttccctttaagttacgacgggaatccagaacaacgccgtatggacccctctgcaggtagcacggaaaaaaaaaaaaaaaaaagcttgtacc

SEQ ID NO: 709 - DNA, 643 bp, Homo sapiens
  misc_feature (1)...(643): n = A,T,C or G
ggtactccttagagccagttgctgtagaactcaaatctctgctgggcaaggatgttctgttcttgaaggactgtgtaggcccagaagtggagaaagcctgtgccaacccagctgctgggtctgtcatcctgctggagaacctccgctttcatgtggaggaagaagggaagggaaaagatgcttctgggaacaaggttaaagccgagccagccaaaatagaagctttccgagcttcactttccaagctaggggatgtctatgtcaatgatgcttttggcactgctcacagagcccacagctccatggtaggagtcaatctgccacagaangctggtgggtttttgatgaagaaggagctgaactactttgcaaaggccttggagagcccagagcgacccttcctggccattctnggcggactaaagttgcagaccagatccagctcatcaataatatgctggacaaaagtcaatgagatgattattggtggtggaatggcttttaccttccttaangngctcaacaccatggagattggcacttctctggttgatgaaaaagggncccagattgcaaagactnatgtccaaactgagaaaaagggntgaanataccttgcctgtgctttgcnctgttncaattg

SEQ ID NO: 710 - DNA, 390 bp, Homo sapiens
ggtactcttctagcatttagatctacactctcgagttaaagatggggaaactgagggcagagaggttaacagatttatctaaggtccccagcagaattgacagttgaacagagctagaggccatgtctcctgcatagcttttccctgtcctgacaccaggcaagaaaagcgcagagaaatcggtgtctgacgattttggaaatgagaacaatctcaaaaaaaaaaaaaaagaaaagagaaaaaaaagactagccagccaggaagatgaatcctagcttcttccattggaaaatttaagacaagttcaacaacaaaacatttgctctggggggcagggaaaacacagatgtgttgcaaaggtaggttgaagggacctctctcttaccaagt

SEQ ID NO: 711 - DNA, 683 bp, Homo sapiens
  misc_feature (1)...(683): n = A,T,C or G
cgaggtcaagaaggcagcccgagaagaaacgggaggacaaagctaagaagaagcacgacaggaaatccaaacgcctggatgaggaggaggaggacaatgaaggcggggagtgggaaagggtccggggcggagtgccgttggttaaggagaagccaaaaatgtttgccaagggaactgagatcacccatgctgttgttatcaagaaactgaatgagatcctacaggcacgaggcaagaagggaactgatcgtgctgcccagattgagctgctgcaactgctggttcagattgcagcggaaaacaacctgggagagggcgtcattgtcaagatcaagttcaatatcatcgcctctctctatgactacaaccccaacctggcaacctacatgaagccagagatgtgggggaagtgcctggactgcatcaatgagctgatggatatcctgtttgcaaatcccaacatttttgntgggggagaatattcttggaagaaaagtgagaacctgcacaacgctgacccagcccttgcgtgtccctggcttgcatnctnacttttggtgggaaccnaatgggttaaagaaattancccaataatgccaaatacttgacccttanttcccaaaaataccttgcccgggcgggcccnttcaaaagggccaaattccancncccttgggggcccg

SEQ ID NO: 712 - DNA, 605 bp, Homo sapiens
  misc_feature (1)...(605): n = A,T,C or G
ggtacaagcttttttttttttttttttttttttctaaacaatagtgctttattgataaaaggttagtttaaatggatacaaaattgctgtgtaaaataagtgttttcaaaatacatttctataggtagagactatgtcttagtaaaagagcagttatctattatcaaaagtatctatttanatttgggtagtaaaaccaaaggggatcagaagtgtancagtgtgggtcctccctccctgcatagctgttaccaggaggcagcgtgcctgaagtacttggaggaacgaagaataaaggagattgtgaagaaacattctcagcttattggatatcccattactctttttgtggagaaggaaccgtgataaagaagtaagcgatgatgaggctgaagaaaaggaagaccaagaagaagaatangaanaagaagagaaagagtcggaagacaaacctgaaattgaanatgttggtctgatgaggaagaaaaaagaaggtggtgcnagaagaananaagaagattaggaaagtcctgccggcggccgtcaangcaatccaccctgcggcgtctangaccactgnncactgngatatgctctgtctggna

SEQ ID NO: 713 - DNA, 376 bp, Homo sapiens
ggtaccaaggttattgatcaagtcagccttggtcattccaattccagtatccacaatagtgagagttcgatcttgtttgttcggtataaggttaatatgcagctctttcccagagtctaatttactgggatctgtcaagctttcataccggattttgtccaatgcatctgatgaatttgaaatgagctctctcagaaagatctctttgttcgagtagaaagtattgatgatcaatgacatcaactgggcaatttctgcctgaaaggcgaacgtctcaacctcctcctcctccatcggttggtcttgggtctgggtttcctcaggcatcttggctaagtgacccgcacaggaccaacggcacagccacaccgacctg

SEQ ID NO: 714 - DNA, 378 bp, Homo sapiens
cgaggtaccaaggttattgatcaagtcagccttggtcattccaattccagtatccacaatagtgagagttcgatcttgtttgttcggtataaggttaatatgcagctctttcccagagtctaatttactgggatctgtcaagctttcataccggattttgtccaatgcatctgatgaatttgaaatgagctctctcagaaagatctctttgttcgagtagaaagtattgatgatcaatgacatcaactgggcaatttctgcctgaaaggcgaacgtctcaacctcctcctcctccatcggttggtcttgggtctgggtttcctcaggcatcttggctaagtgaccgcacaggaccaacggcacagccacaccgacctg

SEQ ID NO: 715 - DNA, 310 bp, Homo sapiens
  misc_feature (1)...(310): n = A,T,C or G
acttttgagtgtgtgtgtgcatgtgtgtgtgtgtgtgtgtgtgtgtgtatgtgagagattctgtgatcttttaaagtgttactttttgtaaacgacaagaataattcaattttaaagactcaaggtggtcagtaaataacaggcatttgttcactgaaggtgattcaccaaaatagtcttctcaaattagaaagttaaccccatgtcctcagcatttcttttctggccaaaagcagtaaatttgctagcagtaaaagatgaagttttatacacacagcanaaaaaaaaaaaaaaaaaaaaagcttgtacc

SEQ ID NO: 716 - DNA, 624 bp, Homo sapiens
  misc_feature (1)...(624): n = A,T,C or G
ggtaccgattgccaggctgtggtctcctcccagtgtgacacggctgtagccatctgacacagctctgctaaccacctcagccagttcctggttggcaagacccactgagcgtggattcactatcaggttgttgtagagatcatctttggggactggagtaaaattcaaatctccaaagtcttttaggtggcagcccaaactggagagccttttcatcaagccagcttctcttatggcagcgggaccatgctccactccgtttcttttctgtccttgtgagaacggggctcctatcacagccacggagtggacggatttcttcaggatggaatgcactcgcgtctggaggagacgcgagaggctgcccttagggacatgatcccgcagcactgagaatctccaaggcagaggctccacatggccggggtgttgaaggtctcaaacataatctgagtcatcttctctctgttggccttggggttcaagggggcctcggcacagcactgggtgctcttncgggccacgcgcacttgtgtaaaagtgngtgccanactttcatgcgnccaattggngaccatcctctnatgggactgccggggccgttnaaggggaatcaccntggng

SEQ ID NO: 717 - DNA, 652 bp, Homo sapiens
  misc_feature (1)...(652): n = A,T,C or G
cgaggtacaaaaattagctgggtgtcgtgatgggtgcctgtaatcacagctatgtgggaggctgaggcaggagaattgcttgaacctgggaggcgaaggttgcagtgagccaagatcacgtcactgcactccagcctctttgacagagtgcgactctgtctcagaaaaaaaaaaaaaagaaagaaaagagattacatattatttagaaaacagcagctaaacagtctttgggtctctggcaaagatgaagtgagccagtcttcttccgactaaatcaccaactggacaaagttctcagctggaaaacactccccttctgggatcctgcgcccagaagtggtagcaagaacttcttggaatagaatggagcagaaccttcctgagcctgaggaaccaacaaaaagtcaaagaatgaactctttcgaacacaaaataaaatttctcaaagcccaggtcatgctttttctgtaaatctttatccctgcgtcagtatggacatgacatagtccagagagaaaattctcagcctaccttatgcncaagaaaatgccatgatgccgccagcttgttgatgcccnaggacantgctnttganggccggaaaataggnctgcagcngggaaccaaaggctgttnncctgnttcttaaaag

SEQ ID NO: 718 - DNA, 544 bp, Homo sapiens
  misc_feature (1)...(544): n = A,T,C or G
cacagagggagtgaggtgcatttgcagtcagctttcgctcaccactaagatggatgcagagcatccggaactcaggagttacgctcagagccaaggttggtggacgggagagggcgagttcaatttttccgaagtcttttctccagttgaggatcatctagactgcggtgctggcaaagacagcttagaaaaacaagaagaaagcatcacagtgcagactatgatgaacaccttacgggacaaagccagcggagtgtgcatagactctgagtttttcctcaccacagccagtggagtgtctgtcctgccgcagaatagaagctctccgtgcattcactacttcactggaacccctgatccttccaggtccatattcaagcttttcatctttggtgatgacgtaaaacttgtccccaaaacacaagtctccctgttttgggggatgacgacccttgccaaaaaggagcctcgggttncaggagaaaccngaaccggccggcattgaacctgtaccttgnccgggccggccgnttcnaangggcga

SEQ ID NO: 719 - DNA, 626 bp, Homo sapiens
  misc_feature (1)...(626): n = A,T,C or G
accaaagaaaagctgaacaggaaaatgagaagagaagaaatgtagaaaatgaagtttctacattaaaggatcagttggaagacttaaagaaagtcagtcagaattcacagcttgctaatgagaagctgtcccagttacaaaagcagctagaagaagccaatgacttacttaggacagaatcggacacagctgtaagattgaggaagagtcacacagagatgaacaagtcaattagtcagttagagtccctgaacagagagttgcaagagagaaatcgaattttagagaattctaagtcacaaacagacaaagattattaccagctgcaagctatattagaagctgaacgaagagacagaggtcatgattctgagatgattggagaccttcaagctcgaattacatctttanagaggaggtgaacatctcaacataatctcgaaaaagtggaaggagaaagaaaagagctcaagacatgcttaatcactcagaaaaggaaagaatatttagagatagatttaactacaacttaaatcnttcacacggtagaccagangtaatgaccccagtaccaagctcgttactgcaacatcattnttgagaggcaagcttggcatgggtaaaaa

SEQ ID NO: 720 - DNA, 469 bp, Homo sapiens
  misc_feature (1)...(469): n = A,T,C or G
ggtactctttagcattaaattacatcgtgcatatacaactacacccatttagatttgccttggaatataatttcaaggccttaaatattaaaaataattttataactatttcatagtttaattggctcttaaatagttttgctagggaggaaacattttgtgttctttaagaaattgatatgtgtaaatgtgttcacttaaatcttgagaaaacctaaggatgaagtctgttgttttgtttttcctaaaaaaggaaaaaagaaccaaagaaaaatgttgaagaacaagaatatttaccattaaaaagaagaaacattatccaacaaaaaggagacatatagatttgaaaacacttattttactgncttcaacaacaacaacaaacagataggcaggggaagtccagaggactcagaattgaagcagctctatacaataatgaaggtggacctgccgggcgggcgctcga

SEQ ID NO: 721 - DNA, 644 bp, Homo sapiens
  misc_feature (1)...(644): n = A,T,C or G
acaaggtcaatctcacttcgagtgaccacaatccggaccagggtggagtcatctgtgccagcacctttcatagcatagtagagcctctcagcaaagaaggcagggcggttcagggcacactgcaagatggtcttcaaaccactttctacatatccggaaaactcacggctcacactgcttaacaagtctcgattagccatcctagaataagcctccatggtagctctcagctgaggaaagcttcttgtggcaaggatcatgttaaagcaagattcatcggtccctagtctcccctcaccagcttgatagagacgctgagcatcttcctgagccatttggtggtttatactctggttctcatcacgatttccctggcacatggacacaagtaaacgttcaaaatgtcctgatgtatctgacctaatgnccttttcaaggtctcgtccaaattctgactgataacatctgacaatttctcggatttcctgatttggtcttgngcacaaaatcttcaatcaatacaccgttcctgagttcctgntncctgcattgntttccgaagcttcaggcatcgnaatcctaggangcttgaaaaggccnggatcagttnttcctattcncttactttgattgaaacnttgata

SEQ ID NO: 722 - DNA, 510 bp, Homo sapiens
  misc_feature (1)...(510): n = A,T,C or G
cgaggtcggagatctcgccggctttacgttcacctcggtgtctgcagcaccctccgcttcctctcctaggcgacgagacccagtggctagaagttcaccatgtctattctcaagatccatgccagggagatctttgactctcgcgggaatcccactgttgaggttgatctcttcacctcaaaaggtctcttcagagctgctgtgcccagtggtgcttcaactggtatctatgaggccctagagctccgggacaatgataagactcgctatatggggaagggtgtctcaaaggctgttgagcacatcaataaaactattgcgcctgccctggttagcaagaaactgaacgtcacagaacaagagaagattgacaaactgatgatcgagatggatggaacagaaaataaatctaagtttggtgccaacgccattctgggggtgtcccttgccgctgcaaagctggtgccgttgagaanggggtcccctgtacctgccnggcggccgtcgaaa

SEQ ID NO: 723 - DNA, 640 bp, Homo sapiens
  misc_feature (1)...(640): n = A,T,C or G
ggtaccaagcgtatcagcattcacctccttgcctcacatgccagtgggctcaatcacaaccctgcctgtgaatctgtaattgactcctcaacatttggagaaggcaaagctccaggtcccccttttcctcaaactcttggcatagccaacgtggccacccgcctctcttccatccagctgggccagtctgagaaggagagacctgaggaggccagggagctggactcatctgatagggatattagttcagctactgacctccagccagatcaggctgagactgaagatacagaagaagaactagtagatggtttggaagactgntgtagccgtgatgagaatgaagaggaggagggagactcagagtgctcctcattaagtgctgctcccccagcgaatcggtggccatgatctctagaactgtatggaaattctgaccaaacccctttccaatcatgagaaaagttgtccgaccagcctcatctacagctctttccaacgttcccctaccatctattttggcactcgggatgaaaaantggagaaactttcctgggaaccnangaagttgcttcnatggaagatgagcncagggaccccaacattgcaaccnaccattggacggncccctttaaatang

SEQ ID NO: 724 - DNA, 593 bp, Homo sapiens
  misc_feature (1)...(593): n = A,T,C or G
ggtacctgcgcgccctcgacgtcaatgtggccttgcgcaaaatcgccaacttgctgaagccagacaaagagatcgtgcaggacggtgaccatatgatcatccgcacgctgagcacttttaggaactacatcatggacttccaggttgggaaggagtttgaggaggatctgacaggcatagatgaccgcaagtgcatgacaacagtgagctgggacggagacaagctccagtgtgtgcagaagggtgagaaggaggggcgtggctggacccagtggatcgagggtgatgagctgcacctggagatgagagtggaaggtgtggtctgcaagcaagtattcaagaaggtgcagtgaggcccaggcagacaaccttgtcccaaggaatcagcaggatgtgtgggccaggatccccttttgcacagcatgaggcaaaaatgtccaccacccccagcattgttagcagatctgctcttgctttgcacttttctttcttaaacaaacctgcataagtgatctgtgttagaaaaactgccggcggccaagcaatcaccatgcgcgtctatgaccactnnncactgcnatatgctantgtct

SEQ ID NO: 725 - DNA, 606 bp, Homo sapiens
  misc_feature (1)...(606): n = A,T,C or G
acngcagctgctccacggccccagcacgaaatgtatcacaggcagcaatgaggacactgaagccattctctaacaaccagaaggaaatcttggcaagattagtagatttccccactccattaacgccgcagaaggtgacgacataagggcgctggcgacgctgggcatccatgatgtcccggagcatgtctacacgacgctgtggctgcagaatctgcaccagggactcctgtagggcttgctttactgtggaagtcaccgtgctgaacgtccccatcaccttcccttccaacttgttggcaacagattcacagagctggacggcaatgtctgcagccacgttcttagcaatgagatgatcacgcatcttgtccagcacagattccatgtcttcacgactcaagctctttgaacccacaaggcccttcagcataccaaacatgccacccagtgttccttggtcgcactangtttggtagagttttgagcagcccttcgtcatcaanctgtgcatccagatctgaactgccccagaccagccttgaataggtgatgcctaacaggagctagggtcatgnggtggagactggcgncacctaggcaatc

SEQ ID NO: 726 - DNA, 594 bp, Homo sapiens
  misc_feature (1)...(594): n = A,T,C or G
accacatcatccatgctgacatctaccgctggtttaacatttcgtttgatatttttggtcgcaccaccactccacagcagaccaaaatcacccaggacattttccagcagttgctgaaacgaggttttgtgctgcaagatactgtggagcaactgcgatgtgagcactgtgctcgcttcctggctgaccgcttcgtggagggcgtgtgtcccttctgtggctatgaggaggctcggggtgaccagtgtgacaagtgtggcaagctcatcaatgctgtcgagcttaagaagcctcagtgtaaagtctgccgatcatgccctgtggtgcagtcgagccagcacctgtttctggacctgcctaagctggagaagcgactggaggagtggttggggaggacattgcctgcagtgactggacacccaatgcccagttatcacccgttcttgcttcnggatggcctcaaccacgctgataacccgagacctcaatggggaacctgtcctcggcggacacctaggcaatcacacactgcggccgtctagtgatccactcgaccacttgcgatatggatantgtctggtaatgatcgtacat

SEQ ID NO: 727 - DNA, 665 bp, Homo sapiens
  misc_feature (1)...(665): n = A,T,C or G
gcgtggtcgcgccgaggtgccgtcaaggagtagaaattggtatgcttagaagcagattctaaaagcagtttctcttcagaacatcttttttcataccacttgataagcatcttgaaacaccatggctgtagctgcagtaaaatgggtgatgtcaaagagaactatcttgaaacatttatttccagtccaaaatggagctttatattgtgtttgtcataaatctacgtattctcctctaccagatgactataattgcaacgtagagcttgctctgacttctgatggcaggacaatagtatgctaccacccttctgtggacattccatatgaacacacaaaacctatccctcggccagatctgtgcataataatgaagaaacacatgatcaagtgctgaaaaccagattggaagaaaaagttgaacaccttgaggaaagacctatgatngaaccacttanccaaatggtcnttactactaagcacccgtggnattcctcatggacngnntacagatgtcntaagaatctgaatcctccaaagaccgatgatgccganggtcctggggggatcaaaagaaaagggncccatttgcatttggnaaaagccanctgggggttccntattttttgtaaggaataatgntaaaaatctttctnttttanaag

SEQ ID NO: 728 - DNA, 624 bp, Homo sapiens
  misc_feature (1)...(624): n = A,T,C or G
ggttacccaggcagtatctctagagtccttaacttaatattagtaactaaagaaaagggttgcgctcgttgcaggacttaacctaacatctcacgacacgagctgacgacaaccatgcaccatctgtcattctgttaacctccactatatctctatagctttgcagaagatgtcaagagtgggtaaggttctacgcgtagaatcaaattaaaccacatgctccaccgcttgtgcgggttcccgtcaattcctttaaatttcactcttgcgagcatactactcaggcggatcatttaacgcgttagctgcgttagtgaaattattccaccaactaatgatcatcgtttacggcgtggactaccagggtatctaatcctgtttgctccccacgctttcgtcccttagtgcaatatataaccagttagctgccttcgcctattgggntcttcctaatatctacgcattccaccgcttcactaggaattccgttacctctttataatctatttggcagtatccaagcggctgaagttgagcttaacatttacttcagacttacaaaaactacgcgcttacgcccaatattccgatacgttgcacnatgattaccggggtgtgccaaaa

SEQ ID NO: 729 - DNA, 449 bp, Homo sapiens
actgacacacaaagtgccttcactggaccttacagttctcactgccgttggactccagtccagctttggggctggggacaagtcggcctcgcttgaccctcaggccctctctggggctgtcagtcggacttctctcaggaagattattgactgggacggatttcgtggtgggttctcggaggatggtgcctgaatctactgggctccgctgagcaactttgaccttttgtgatctgctgccaccagctgttggtttggaggactctgcaagattttctttgccgagactcagtggggatagcgctaacttctgtgcaaccaggcgggggctggtcccagttgccatggttgttcttcgcaggatatatgggctaagtctttcctgtcgggatgtcagcaaaccctttctttacaacttctggaagtccctctggctcaaactcagtacc

SEQ ID NO: 730 - DNA, 646 bp, Homo sapiens
  misc_feature (1)...(646): n = A,T,C or G
actcattaatcagggagcctcaatcttagtaaaagattacattttgaagaggacacctattcatgcagcagcaacaaatggtcattcagaatgcttacggctattaataggaaatgcagaaccacagaatgcagtggatattcaagatggaaatggacagacgcctctgatgctatctgttctcaacgggcacacagactgtgtttactcattgctgaacaaaggagcaaatgtagatgccaaagataagtggggaaggacagcgttgcatagaggggcagttacaggccatgaagaatgtgtagatgcattacttcaacatggtgctaagtgcttacttcgggatagcaggggcccggacgcctatacacctgtctgctgcctgtggacacattggtgttcttggagcccttttgcagtcagcagcatctatggatgcaaatccagccacagcagacaatcatggatatccgnacttactgggcttgtacaatggtcacgagacatgtgtagaactgnttttagaacaggaagttttccagaaaacggaaggaaatgcttttagtccattgcattgngccgtgataaatgccaccaaagggctgttaaangttaattgatcnttangggccacattgggaacccc

SEQ ID NO: 731 - DNA, 639 bp, Homo sapiens
  misc_feature (1)...(639): n = A,T,C or G
acagacttgtttttgagtgttgagtagcagggacaaaataagggaatgttattttttaagaaaattcattttcattgttgtctccttccttttctgtgaaagtcctcatactgagaaatttgtatattttatattaaatcacttactattgatttttgttgtgattttcaaaggtggattcccacagataaaatcttggctattgcccaaaacatagtaaagggtcacgtgtgactttttataataggaagaaaattctgcctttgtgagtgcacatgtccacatttcatccctccttccctcaaaaccctagagaggggcattaaagaattgttgatgtatatgcaatgtctgttaaagcatgcactatgtatttcatcctcatttattgggtctgggactgaagtttttaacccacatggacctaacctactttttgggataaaattctctgtttggtacaggcaaaattctggtatggcgtgaatgccatgggtcattctgaatatattttttctggaatttatcatacacgatgttgcaatacgtgctttggtttttaatttgaagccaacttttctactgttgaaagacatttttgccaactggnccttctanaatggagtctaagttaggncg

SEQ ID NO: 732 - DNA, 538 bp, Homo sapiens
  misc_feature (1)...(538): n = A,T,C or G
ggtactcgtcccttcaaacagtaaacaagaaagtgcagacagtgctgccagagacaggaggattttcacatgagactgaaaaagccgacacacccttacaactaagtcatggtcgagtcggacctgccatccacctccaccagtccctggaacccggcaggtcagagttttctctaattctattccccggcatcaagtgaacactagaactcacacggaaggccccgagcaaccactggcctcggggctgggtgcacccactcctcacccagggagattgtcacaaaacacgctagggggcagagacgctgtaaactggacacacacggaacacaatgccctttccacttacacagcgtggggatgataaaaaggaatcttttgagcaagtctataattttacagaatttagaggtgggaaagatggccaattttccttctttatgcctggggcagaccacctgcttctggggtaaagtgtttgagaaggaaaaagaccctgnacctgccnngggcggcgctcgaaaggccaattcna

SEQ ID NO: 733 - DNA, 351 bp, Homo sapiens
cgaggtaccctatggcctatgttgactataagactgtgctgcagattgatgataatgtgacgtcagccgtagaaggcatcaacagaatgaccagagctctcatggactcgcttgggcctgagtggcgcctgaagctgccctcaatccccttggtgcctgtttcagttcagaagaggtggaattccttgccttcggagaaccacaaagagatggctaaaagcaaatccaaagaaaccacagctacaaagaacagagtgccttctgctggggatgtggagaaagccagagttctgaaggaagaaggcaatgagcttgtaaagaagggaaaccataagaaagctattgagaagt

SEQ ID NO: 734 - DNA, 625 bp, Homo sapiens
  misc_feature (1)...(625): n = A,T,C or G
cgaggtacaatccttgaccttgtgcattatagcattccattagcaagagttgtaccatccttcatccaaatggcaacatcacagagctcctcctgaaggaaggtttcgcacgctgtgtggactggtcgattgcagtttacacccggggcgcagaaaagctgagggcggcagagaggtttgccaaagagcgcaggctgagaatatggagagactatgtggctcccacagctaatttggaccaaaaggacaagcagtttgttgccaaggtgatgcaggttctgaatgctgatgccattgttgtgaagctgaactcaggcgattacaagacgattcacctgtccagcatccgaccaccgaggctggagggggagaacacctaggataagaacaagaaactgcgtcccctgtatgacattccttacatgtttgaggccccgggaatttcttcgaaaaaagcttattgggaaaaagtcaatgtgacngtggactacattagaccaccagcccagccacagagacagtgctgcctttcaaacgtcctgccgggcggccgtcaaaggcnattcaccatggcggcgtctatggaccactcggaccactgggaactggctactgtctgggaatg

SEQ ID NO: 735 - DNA, 677 bp, Homo sapiens
  misc_feature (1)...(677): n = A,T,C or G
actttctatgagaagcgtatgaccacagaagttgctgctgacgctctgggtgaagaatggaagggttatgtggtccgaatcagtggtgggaacgacaaacaaggtttccccatgaagcagggtgtcttgacccatggccgtgtccgcctgctactgagtaaggggcattcctgttacagaccaaggagaactggagaaagaaagagaaaatcagttcgtggttgcattgtggatgcaaatctgagcgttctcaacttggttattgtaaaaaaaggagagaaggatattcctggactgactgatactacagtgcctcgccgcctgggccccaaaagagctagcagaatccgcaaacttttcaatctctctaaagaagatgatgtccgccagtatgttgtaagaaagcccttaaatanngaaggtaagaaacctaggaccaaagcaccaagattcaanngtcttggtactccacgtgtcctgcagcacaaaccggcggtgtattgctntnnaaaaaccagcgtaccttnggccgngaacacccttanggccgaatttccagnccacttggcnggccgntnctaatgggaatccancttcggtacccanncttggcggaatcatgggcatancttggttccctgggtgaaaatggtattccgttcaaaattccnccaann

SEQ ID NO: 736 - DNA, 651 bp, Homo sapiens
  misc_feature (1)...(651): n = A,T,C or G
ggtactattgaagaactggctccaaatcaatatgtgattagtggtggagtagctattcttaattctacaaccattgaaatctcagagcttcccgtcagaacatggacccagacatacaaagaacaagttctagaacccatgttgaatggcaccgagaagacacctcctctcataacagactatagggaataccatacagataccactgtgaaatttgttgtgaagatgactgaagaaaaactggcagaggcagagagagttggactacacaaagtcttcaaactccaaactagtctcacatgcaactctatggtgctttttgaccacgtaggctgtttaaagaaatatgacacggtgttggatattctaagagacttttttgaactcagacttaaatattatggattaagaaaagaatggctcctaggaatgcttggtgctgaatctgctaaactgaataatcaggctcgctttatcttagagaaaatagatggcaaaataatcattggaaataagcctaagaaagaattaattaaaggtctgattcagangggatatgattcggatcctgtgaaggcntggaaagaaacccannaaanggttcngattaagaaaaaaatnaanaagagngccancaaaggaacttgaaan

SEQ ID NO: 737 - DNA, 404 bp, Homo sapiens
cgaggtactgtgtggccaccatgccatgtctagagccaggctcccgttgttggccatgccttgctttgaggctttggctctgcacgagacgccgcagagaacgtcttgatgcctcgctccccttatcctcaccacttccttcttaggggtggaaatgctggatcaaagggtcttcacgttttctgacttttccacgcatggggttagcctgtgctccggagaccctgtgagcacacatgtccccagcgcagcttgtgactcctgcctctctgaccccgccaggtggattacaaagctgacgagtggctgatgaagaacatggatcccctgaatgacaacatcgccacactgctccaccagtcctctgacaagtttgtctcggagctgtggaaggatggtacctg

SEQ ID NO: 738 - DNA, 250 bp, Homo sapiens
acatcaaagattacatgaaatcaatcaaagggaaacttgaagaacagagaccagaaagagtaaaaccttttatgacaggggctgcagaacaaatcaagcacatccttgctaatttcaaaaactaccagttctttattggtgaaaacatgaatccagatggcatggttgctctattggactaccgtgaggatggtgtgaccccatatatgattttctttaaggatggtttagaaatggaaaaaaaaaaacc

SEQ ID NO: 739 - DNA, 582 bp, Homo sapiens
  misc_feature (1)...(582): n = A,T,C or G
acagtaaggacaaccccaacctgctgttcaacatgtgtggcttcgagtgccgcatcctgcctaagtgccgcaccagctatgaggagttcacccacaaggacggggtctggaacctgcagaatgaggttactaaggagcgcacagctcagtgtttcctgcgtgtggacgatgagtcaatgcagcgcttccacaaccgcgtgcgtcagattctcatggcctctgggtccaccaccttcaccaagattgtgaataagtggaatacagctctcattggccttatgacatactttcgggaggctgtggtgaacacccaagagctcttggacttactggtgaagtgtgagaacaaaatccagacacgtatcaagattggactcaactccaagatgccaagtcggtccccccggttgtgttctacacccctaaggagttgggtggactcggcatgctctcaatgggccatgtgctcatnccccaatccgacctcaggtgggtccaaacagacngatgtaggtatcacacactttcgttcaggaatgagccttgaagaagaccacttattcccacttgnacctcggccgg

SEQ ID NO: 740 - DNA, 576 bp, Homo sapiens
  misc_feature (1)...(576): n = A,T,C or G
ggtaggacaccgaacccctgattcagacagcaaaaaccacgctgggctccaaagtggtcaacagttgtcaccgacagatggctgagattgctgtgaatgccgtcctcactgtagcagatatggagcggagagacgttgactttgagcttatcaaagtagaaggcaaagtgggcggcaggctggaggacactaaactgattaagggcgtgattgtggacaaggatttcagtcacccacagatgccaaaaaaagtggaagatgcgaagattgcaattctcacatgtccatttgaaccacccaaaccaaaaacaaagcataagctggatgtgacctctgtcgaagattataaagcccttcagaaatacgaaaaggagaaatttgaagagatgattcaacaaattaaagagactggtgctaacctacaatttgtcagtggggctttgatgatgaagcaaatcacttacttcttcagaacacttgccttgcggttccttggtaggaggacctgaaattgagctgattgccatcgcaacagganggcggatcgccccagttctcaagctnacagccgagaan

SEQ ID NO: 741 - DNA, 579 bp, Homo sapiens
  misc_feature (1)...(579): n = A,T,C or G
accttatctgaaactcttgcacttccccaaccagggcagaaatgaggtgggagaagtttgactaaaatgagggatgggggaaagtaaaagatgtttttttttttttgagactcgctttgtcacccaggctggagtgcaatggcacaatctcaactcaccgcaacctccgcctcccgggttcaagcgattctcctgcctcagcctcccgagtagttgggattacaggcgcctgcctccatgcctggctaattttgtatttttagtagagacagggtttcttcatgttggtcaggctggtctcaaactcctaacctcgtgatccgcctgcctcgacctcccaaagtgctgggattacaggcatgagccaccatgcccagccaaagatcatttttttatatagacttcaccctttgtaaatactgtactgggggagtatagagtagaaaaaaagtttagttaaaacatttgtttacaaattaacctttaaaaatntaattactgctaaaaatagaaggctgttncccttaaggaaaattagngccattttggaaatganacttgggccataaatncaggtgg

SEQ ID NO: 742 - DNA, 578 bp, Homo sapiens
  misc_feature (1)...(578): n = A,T,C or G
ggtactttgggatgctttactaggtgttttccattagaattagaccttgattttaaatccaagcaagcttgaagccccttggcttacagcatttgcctgctgaatactaaacactcacatggcaagagttgctctggagaggtagggccagaggaatgctgctgcactgccaactcaggcacatgcttagctgtaaagggaagcgaggtgaagtcgtcctgcagcgtattagagtaaaagtctacccctctgaagcactattaagcgcttaaccgtatatttaaatactaccatgtgctatctactgaggaagattcatgttcaattatttggaaataatgcaagcatccactaagggcctttaagctttctttgattataattaaggttcattttaagttnttttttttctttcaaccagtgtgccatctccaatatttctatagtataccaaccaccccaggaatgcactttaacaatatcagggatttatataaccaaatagtttcaaatccaacaaaattccctttatgaactttcgctttttaagactactgatgggtacctgccgggcggcc

SEQ ID NO: 743 - DNA, 592 bp, Homo sapiens
  misc_feature (1)...(592): n = A,T,C or G
ggtctttagaaagttccatgattctgcatatactgtttgaactgaatcatgatgtctttagaaagtatatgcagaatcagaatgttccgggaaatattgagttaactgtgaatatcctgacaatgggctattggccgacatatgtgcctatggaagttcatttaccaccagagatggtaaaacttcaggagattttcaagacattttacctaggcaaacatagtggcaggaaacttcagtggcagtcaaccctaggacactgtgtgttaaagcagaatttaaagagggtaaaaaggaactccaggtctctctttttcaaacactggtgctgctaatgtttaatgagggagaggagttcagtttagaagagatcaagcaggcaactggaatagaaggatggagagttaaggagaacactgcagtcattagcctggtggcaaaagctagagttctggcgaaaaaatnccaanggccaaagacctttgaanatggtgacaagttcanttngtaatngatgattcaaaccttaaactttcaggatnaaggatcaatcaaatncaaaaaaaaaaannnaaaaaaaagcttgttccga

SEQ ID NO: 744 - DNA, 578 bp, Homo sapiens
  misc_feature (1)...(578): n = A,T,C or G
ggtaccaaacatagcccttaggcctgggctaggctctcaaaggtctttcccagaaatggaggcagcagtagcttcaaacaggcacaaaaacagccaggaggaggcagcatccactccatgaaggcctaagacaatgaaaggaagccagagcaacagaccaccttgggatccggggagaagggtaaatgggcaaaagggttgtatttcctgatgctctcagaacatcagaccacaccatgtgaatttaagcaggactattttaagtggggaaacaatactagaagcatttggtgtattttcctggcactcacctcctaggtaagcaggagagcgggacactcaggagttgtgactaaactcacacttaagctgcctgtccagaccgtccccttggctgaacacaacactgaaattgtggcagtgtctgttgcnccagtggacctncacttactaatgagtatgtaaaacagangagccacagtgaggcntttcacaaaacccanggctcttgggggaaaaacgggtttccaccttctgncttttggtgctggaaagtncctgaggganaagaagtttgn

SEQ ID NO: 745 - DNA, 581 bp, Homo sapiens
  misc_feature (1)...(581): n = A,T,C or G
acagatcaggcaactgtggaaaatctaaacgaactgcgccaagatctgtcaaaattccgaaatgaaataagggatttacctggctttcggacttctaaatatgctatgttttatccaagaaattaaccattttctaaatcatggagcgaataattttcaataacagatccaaaagactatattgcataacttgcaatgaaattaatgagatatatattgaaataaagaattatgtaaaagccattctttaaaatatttatagcataaatatatgttatgtaaagtgtgtatatagaattagttttttaaaccttctgttagtggctttttgcagaagcaaaacagattaagtagatagattttgttagcatgctgcttggttttcttacttagtgctttaaaatgtttttttttatgtttaagaaggggcagttataaaatggacacattgcccaaaaaggttttggaaaantggaagacccagcaaatggtanggcttgacctccttcacaaggatacacttggaaatatagaaagttatgtttaaatatctctggtttaggagttcacatatagttaag

SEQ ID NO: 746 - DNA, 506 bp, Homo sapiens
  misc_feature (1)...(506): n = A,T,C or G
ggtacaagcttttttttttttttttttttttttttttttttaggtagtgggtgttgagcttgaacgctttcttaattggtggctgnttttaggcctactatgggtgttaaattttttactctctctacaaggntttttcctantgtccaaagagctgttcctntttggactaacagttaaatttacaaggggatttaaagggttctgtgggcaaatttaaagttgaactaagattctatcttggacaaccagctntcaccaggctcggtaggtttgtcgcctctacctataaatcttcccactattttgctacatanacgggtgtgctcttttanctgttcttaggtanctcgtctggtttcgggggtcttanctttggctctccttgcaaagttatttctagttaattcattatgcanaaggnataggggttaagtccttgctatattatgcttgggtataattttcatctttnccttgcggnacctgcccggccggccgtttna

SEQ ID NO: 747 - DNA, 454 bp, Homo sapiens
ggtactttggcttcaatgattggcaacttctacaggggccagtcttttgaactggacaaccttacaagtatatgagtattatttataggtagttgtttacatatgagtcgggaccaaagagaactggatccacgtgaagtcctgtgtgtggctggtccctacctgggcagtctcatttgcacccatagcccccatctatggacaggctgggacagaggcagatgggttagatcacacataacaatagggtctatgtcatatcccaagtgaacttgagccctgtttgggctcaggagatagaagacaaaatctgtctcccacgtctgccatggcatcaagggggaagagtagatggtgcttgagaatggtgtgaaatggttgccatctcaggagtagatggcccggctcacttctggtatctgtcaccctgagcccatgagctgccttttagggt

SEQ ID NO: 748 - DNA, 569 bp, Homo sapiens
  misc_feature (1)...(569): n = A,T,C or G
ggtaccagctggcacaggagcagggggcatggcacctctgttgtttatgcccatagcacctcccatagccatctgacccatccgaatctcctgctctctcgcatcagggaaggttcccttgaatccttcctgctgtcgccgcatcatttcttcttgctgccgccgcatctcttcttcacggcgcctgcgctcttcctcctgcctgagctccagttgctttcgtttttgcacctcttggttgtgcagctcttccatcctccgaagttcttcttggcgcctcatcaaatcctgtctcattagcatgacctggtgctcatggcgtgcagcttccatctccatctccagcttctcacgagcctccttgatgttgcggtccacttggtcctgctgctgcttctccatctcaatgagtgccttncagcgcatggcatattcatactcaaaggaaccaggctgtgcaaatctgggtggctgctctcgttccttgtgaaatgctggttttataaccagcttcnttggaagccctcttcatcaatctaacctggtccatgggctccacagtcacaagg

SEQ ID NO: 749 - DNA, 428 bp, Homo sapiens
acatggatattcccaaaccattccattagaaaactgccctccctgcacacacaacaaaaacagcgctatttcctacacctattggactgaaagtgcttggaaatggaatggttttagaatatgaagaagaacacaaaccaagtagctgtgggttgaacctggacgtgagctggctgcagggccgttgggtagaaaaccagcatctcataaacaggtcactccactggatggtttgtcactggatggtttgttggggtggtggtcacaggcgcaaaggacatgcacacggccacgctacgctactgtaaccaagaggtgacttcagccatgaataaggtgaagaggttacacatctacctacggaatataataacatacaatgacttataaagtgactacatgcatatgagcaagcaaagtacctcggc

SEQ ID NO: 750 - DNA, 569 bp, Homo sapiens
  misc_feature (1)...(569): n = A,T,C or G
acctgccagaattagcaagagctttctttaagaagacatttgtcaaactcaacaaattgaaggttaacaccttaagagttgtagttactgaccagaaatatggacagacttcttagacttggaggaggtatgcctggactgggccaggggccacctacagatgctcctgcagtggacacagcagaacaagtctatatctcttccctggcactgttaaaaatgttaaaacatggccgtgctggagttccaatggaagttatgggtttgatgcttggagaatttgttgatgattataccgtcagagtgattgatgtgtttgctatgccacagtcaggaacaggtgtcagtgtggaggcagttgatccagtgttccaagctaaaatgttggatatgttgaagcagacaggaaggccggagatggttgttggttgggtatcacagtcaccctggctttggttgntggctttctggtgtggatatcaacactcagcagagctttgaagccttgtcgganagaacttgtggcaagtggttgtggatcccattcagagtgtaaaaggaaaggttgt

SEQ ID NO: 751 - DNA, 568 bp, Homo sapiens
  misc_feature (1)...(568): n = A,T,C or G
acctgaagctcaggaggagatgaaagaagtagccaaacacccaaagaatcctgaggttggcttgaagcctgtgtggtatagtcccaaagttttcattgaaggtgctgatgcagagactttttcggagggtgagatggttacatttataaattggggcaacctcaacattacaaaaatacacaaaaatgcagatggaaaaatcatatctcttgatgcaaagttgaatttggaaaacaaagactacaagaaaaccactaaggtcacttggcttgcagagactacacatgctcttcctattccagtaatctgtgtcacttatgagcacttgatcacaaagccagtgctaggaaaagacgaggactttaagcagtatgtcaacaagaacagtnagcatgaagagctaatgctaggggatccctgccttaaggattttgaaaaaaggagatattatacaacttcagagaagaggattttcatatgtgatcaaccttatgaacctgtaacccatgtagttgcaaggaancccgtgtgtttgatatacattcctgatggcacacaangaaatgcc

SEQ ID NO: 752 - DNA, 312 bp, Homo sapiens
accgccagggatgtcccttccagccctgggatggactagaggagcacagccaagccctgagtgggaggctgcgggccattctccagaatcagggaaactgaaggatgggcctcagtctctaaggaaggcagagacctgggttgagcagcagaataaaagatcttcttccaagaaatgcaaacagaccgttcaccaccatctccagctgctcacagacaccagcaaagcaatgtgctcctgatcaagtagattttttaaaaatcagagtcaattaattttaattgaaaatttctcttatgttccaagtgtacc

SEQ ID NO: 753 - DNA, 334 bp, Homo sapiens
ggtacaagcgtctgcagcagactgtggcgggcgaaggagcaggattccagggcgctgttgggcttggtcacgaacgccagcagcaggggtgcaagggccttggggaaatagtcctgctgcaccatgtggttcagcgccatcagggggccgtacagttttttcccacgggacaaaaaatgcctaaggaagggagaacataataaaggggtttctttctctccctctttctttcacattaagacctacacttaaatattttccatagaaaaccatcttcctaattgtcttttgaatgaaattctgacttggtgccacaaggactaatacccgccga

SEQ ID NO: 754 - DNA, 533 bp, Homo sapiens
  misc_feature (1)...(533): n = A,T,C or G
ggtcgccgccactgtccggccacagcctaacgctcttcgctgtcgtttgcggtctcgcgcagggcggccccggttctggtgtttggcgtcggaattaaacaaccaccatgtcgagcaaaaaggcaaagaccaagaccaccaagaagcgccctcagcgtgcaacatccaatgtgtttgccatgtttgaccagtcacagattcaggagttcaaagaggccttcaacatgattgatcagaacagggatggcttcatcgacaaggaagatttgcatgatatgcttgcttctctagggaagaatcccactgatgcataccttgatgccatgatgaatgaggccccagggcccatcaatttcaccatgttcctgaccatgtttggtgagaagttaaatggcacagatcctgaagatgtatcagaaacgcctttgcttgctttgatgaagaagnacaggcaccattcaggaagatacctaagagactgttgccaccatggggggatcggtttacanaataagaagtggatgantgtcctg

SEQ ID NO: 755 - DNA, 571 bp, Homo sapiens
  misc_feature (1)...(571): n = A,T,C or G
ggtaccttattagaaagcgacggcaaactatgtgccagcagccgcggtaatacataggtcgcaagcgttatccggaattattgggcgtaaagcgtccgtaggttttttgctaagtctggagttaaatgctgaagctcaacttcagtccgctttggatactggcaaaatagaattataaagaggttagcggaattcctagtgaagcggtggaatgcgtagatattaggaagaacaccaataggcgaaggcagctaactggttatatattgacactaagggacgaaagtgtggggagcaaacaggattagataccctggtagtccacgccgtaaacgatgatcattagttggtggaataatttcactaacgcagctaacgcgttaaatgatccgcctgagtagtatgctcgcangagtgaaatttaaaggaattgacgggaacccgnacaagcggtggagcatgtggtttaatttngattctacgcgtagaaccttacccactcttgacatcttctgcaagctatagagatatagtggaggttacagaatgacagatggtgcatggttgtccg

SEQ ID NO: 756 - DNA, 570 bp, Homo sapiens
  misc_feature (1)...(570): n = A,T,C or G
ggtccactggaaaggcaacatgaccaggctgccccgcctcctggttctgcccaagttctccctggagactgaagtcgacctcaggaagcccctagagaacctgggaatgaccgacatgttcagacagtttcaggctgacttcacgagtctttcagaccaagagcctctccacgtcgcgcaggcgctgcagaaagtgaagatcgaggtgaacgagagtggcacggtggcctcctcatccacagctgtcatagtctcagcccgcatggcccccgaggagatcatcatggacagacccttcctctttgtggtccggcacaaccccacaggaacagtccttttcatgggccaagtgatggaaccctgaccctggggaaagacgccttcatctgggacaaaactggagatgcatcgggaaagaagaaactccgaagaaaagaattttagtgttaatgactctttctgaaggaagagaaacatttgcctttggttaaaagatggtaaaccagatctggcttccaagacctngccttttcttggaggacctttaggtcaaactccctagtttcacct

SEQ ID NO: 757 - DNA, 578 bp, Homo sapiens
  misc_feature (1)...(578): n = A,T,C or G
acaagcttttttttttttttttttttttttttttttttgggagtaagaaaaggtggggattaagaanacgtttctggaggcttagggaccaaggctggtctctttcccccctcccaacccccttgatccctttctctgatcaggggaaaggagctgagtgagggaggtagagttggaaagggaaggattccacttgacagantggcacanactcctccagagtanagcttggagggagattgaaagtggagataatactgctgacacctcccttgaagctnagatgggaaatggacatacttagaaatttagtgactttaatagcctggatttccctntncaaaacttttagaatggaaaatcccatccccttccttatatagtgacttctacccactaccttctaccattttctactttgggcttatgatgatggccattatctacatgngtttttagnaccctggtttggttctaaanggggatcttggaacccnagnttnttgggagatttttaagaaggaagttttaactgaacaaatggaatgggcnccagaaagaaatccagggtnncccng

SEQ ID NO: 758 - DNA, 567 bp, Homo sapiens
  misc_feature (1)...(567): n = A,T,C or G
ggtacgagattgaaaggttgagggttctactgcaggaagaaggcacccggaagagagaatatgaaaatgagctggcaaaggtaagaaaccactataatgaggagatgagtaatttaaggaacaagtatgaaacagagattaacattacgaagaccaccatcaaggagatatccatgcaaaaagaggatgattccaaaaatcttagaaaccagcttgatagactttcaagggaaaatcgagatctgaaggatgaaattgtcaggctcaatgacagcatcttgcaggccactgagcagcgaaggcgagctgaagaaaacgcccttcagcaaaaggcctgtggctctgagataatgcagaagaagcagcatctggagatagaactgaagcaggtcatgcagnagcgctctgaggacaatgcccggcacaagcagtccctggaggaggctgccaagaccattcaggacaaaaataaggagatcgagagactcaaagctgagttcaggaggaggccaaccccgttgggaatatgaaaatgactgataaggtagaaacattatgatgaggagg

SEQ ID NO: 759 - DNA, 266 bp, Homo sapiens
ggtcaccgacctctctccccagctgtatttccaaaatgtcgctttctaacaagctgacgctggacaagctggacgttaaagggaagcgggtcgttatgagagtcgacttcaatgttcctatgaagaacaaccagataacaaacaaccagaggattaaggctgctgtcccaagcatcaaattctgcttggacaatggagccaagtcggtagtccttatgagccacctaggccggcctgatggtgtgcccatgcctgacaagtacctg

SEQ ID NO: 760 - DNA, 381 bp, Homo sapiens
ggtacactagaaagtcttttacaaaataatcatcttagatcaacagaagaccaatcttcaatgtcgtcctgcaagatgggttactttaacatctcctcctgttttctccaatgttctcctttagtatggctggtaattgttttggtgattgccaccccctcgagatgccttgccataagtgctctgttggccactgtagtctgcatatccctgtccatatccatagttcccatagttatacccagtataatcatatccgccatagccactatagttttgatcaccaccataggcactattgtaatttccatatccttgatcataatagttattaaatccttggttccagttttggccctgacctcggccacgacccctcgt

SEQ ID NO: 761 - DNA, 401 bp, Homo sapiens
actcagctccaattatctaatattcttgaaaggatgctgatattgtttggttgtgtccccccacaaatctcaacttgaattgtatctcccagaattcccacgtgttgtgggacagacccagggggaggtaattgaatcatgggggccagtctttcccgtgctattctcgtgacagtgaataagtctcatgagatctgatcagtttatcaggggtttctgcttttgcttcttcctcattttttcttgccacaatgtaagaagtgtcttttgcctcccaccatgattctgaggcctccccagccatgtggaactttaagtccaattaaaccactttttcttcccagtctcgggtatgtctttatcagcagcgtgaaaacggactaatacagtaaattggtacc

SEQ ID NO: 762 - DNA, 610 bp, Homo sapiens
  misc_feature (1)...(610): n = A,T,C or G
acgcttgttgatttcatcctcatacttgttcttgaagtcttccaccaggtcctgcatgtttcttagctctgagtccaggcggccccgttcccccacgatgctgtccagctgcctcctgaggttgttgatgtacagtaaaaacacatctaacatctttgaagaccaaatttcctgctgaacagtattacagatttcatgagcactggaggtttgtgttgcagcgcttggtcttcttggcagcatttgttgtgtatttggaaacagaaacactagtgactcgagaagcagttacagaaattcttggcattgagccagatcgggagaaaggatttcatctggatgtagaagattatctctcaggagttctaattcttgccagtgaactgtcgaggctgtctgtcaacagcgtgactgctggagactactcccgacccctccacatctccaccttcatcaatgagctggattccggttttcgccttctcaacctgaaaaatgactccctgaggaagcgctacgacggattgaaatatgacgtgaagaaagtagaaggaagtggtctatgatctctncatccgggctttaataaggagacggcagcagcttgtgn

SEQ ID NO: 763 - DNA, 578 bp, Homo sapiens
  misc_feature (1)...(578): n = A,T,C or G
cgaggtaccctgaagaacttccctaatgccatcgagcacaccctgcagtgggctcgggatgagtttgaaggcctcttcaagcagccagcagaaaatgtcaaccagtacggatgctacttgtccaatgatggtaaaagggtagcttactggttgtcctccgattcaggttagaatgaggaggtctgcggctaggagtcaataaagtgattggcttagtgggcgaaatattatgctttgttgtttggatatatggaggatggggattattgctaggatgaggatggatagtaatagggcaaggacgcctcctagtttgttagggacggatcggagaattgtgtaggcgaataggaaatatcattcgggcttgatgtggggaggggtgtttaaggggttggctagggtataattgtctgggtcgcctangaggtctggtgagaatagtgttaatgtcattaaggagagaaggaagaagaagtaagccnagggcgtctttgattgtgtantaagggtggaaggtgattttatcggaatgggaagtgattcctaaggggttggttgatcccgttctgcaanan

SEQ ID NO: 764 - DNA, 500 bp, Homo sapiens
actatataacagttggcacaacccaccccacaacagaagagaacacatttttctcaagcatatgtggaatagtttccaggagaaaccatgtgttaggccacaaaacaaatcttaatgaaatgtaaaagactgaaacacaaagtacagcatcactcggattctgtgtccaatggccttagcaggaagattgcttcggaatttggcacgaaccatgccactgtttccatgggcccgagttacttttccccagatgactctggttttgtttggtttgccgccaggagtgactgtgttgttctttgctttatatacataagcgcatctcttgcccaaatagaattctgtttcatcttcgggccgtaaacaccttcaattttaagaagagctgtgtgctccctttggttccggagaccccgcttatagccagcaaaaatggccttggaccacaagcctttcagacatagttcctttagaagtccgacttcggccggcgaccacgc

SEQ ID NO: 765 - DNA, 578 bp, Homo sapiens
  misc_feature (1)...(578): n = A,T,C or G
ttccagagcatattgatgagagaaggatctgcaatgctgtttctccagacaaggatgttgatggctttcatgtaattaatgtaggacgaatgtgtttggatcagtattccatgttaccggctactccatggggtgtgtgggaaataatcaagcgaactggcattccaaccctagggaagaatgtggttgtggctggaaggtcaaaaaacgttggaatgcccattgcaatgttactgcacacagatggggcgcatgaacgtcccggaggtgatgccactgttacaatatctcatcgatatactcccaaagagcagttgaagaaacatacaattcttgcagatattgtaatatctgctgcaggtattccaaatctgatcacagcagatatgatcaaggaaggagcacagtcattgatgtggggaataaatagagttcacgatcctgtaactgtcaaacccaagttggttggagatgtgggattttgaaggagtcagacaaaaagctgggtatatcactccagttcctgggangtgtttggccccatgacagtggcaatgctaatgaagaataccattntt

SEQ ID NO: 766 - DNA, 569 bp, Homo sapiens
  misc_feature (1)...(569): n = A,T,C or G
actgtatttatattgtttatattattttagtaatgtaatgttttgcttccaaagattgccttgcctttacattttgtgcaaaaatagcagctatacattaatgacataataagtatgtctagtattatttaagtgcctattcatattttctcatcaaagctttttatgaatgattataatgcattttctataaaatattattgctttcactgtataccagtgattcaaactttattgtcttcaacagcaatgacatgaaatcactctagttgcccatcagtggtggattggataaagaatatgtggtactatgtgactatcattgatgccccaggacacagagactttatcaaaaacatgattacaggggacatctcaagctgactgtgctgtcctgattgttgctgctggtgttggtgaatttgaagctggtatctccaagaatgggcagacccgaaagcatgcccttctggcttacacctgggtgtgaaacaacctaatggccggggttaccaaaatgggattccactggaccacctacagccagaagagatntgaaggaaattnnt

SEQ ID NO: 767 - DNA, 580 bp, Homo sapiens
  misc_feature (1)...(580): n = A,T,C or G
acgaagctacccagggagatctgaatgatgctaaaaataaacagaaatttgttttaaaggtccaaaagcctgccaacccctgggaattctacattgggacccagttgatggaaagactaaagccatctatgcagcacatgtttatgaagttctattctgcccacttattccagaatggcagtgtattagtaggagagctctacagctatggaacattattaaatgccattaacctctataaaaatacccctgaaaaagtgatgcctcaaggtcttgtcatctcttttgctatgagaatgctttacatgattgagcaagtgcatgactgtgaaatcattcatggagacattaaaccagacaatttcatacttggaaacggatttttggaacaggatgatgaagatgatttatctgctggcttggcactgattgacctgggtcanagtatagatatgaaactttttccaaaaggaactatattcacagcaaagtgtgaaacatctgggntttcaatggtgttgaaaatgctcancaacaaaccatgggaactaccagaatcgattactttggggttgctgca

SEQ ID NO: 768 - DNA, 355 bp, Homo sapiens
ggcaggtaccctatggcctatgttgactataagactgtgctgcagattgatgataatgtgacgtcagccgtagaaggcatcaacagaatgaccagagctctcatggactcgcttgggcctgagtggcgcctgaagctgccctcaatccccttggtgcctgtttcagctcagaagaggtggaattccttgccttcggagaaccacaaagagatggctaaaagcaaatccaaagaaaccacagctacaaagaacagagtgccttctgctggggatgtggagaaagccagagttctgaaggaagaaggcaatgagcttgtaaagaagggaaaccataagaaagctattgagaagtacc

SEQ ID NO: 769 - DNA, 611 bp, Homo sapiens
  misc_feature (1)...(611): n = A,T,C or G
cgaggtaccacgatcctgatgatgaaccagtggccgatccttatgatcagtcctttgaaagcagggacctccttatagatgagtggaaaagcctgacctatgatgaagtcatcagctttgtgccaccaccccttgaccaagaagagatggagtcctgagcacctggtttctgttctgttgatcccacttcactgtgaggggaaggccttttcacgggaactctccaaatattattcaagtgcctcttgttgcagagatttcctccatggtggaagggggtgtgccgtgcgtgtgcgtgccgtgttagtgtgtgtgcatgtgtgtgtctgtctttgtgggagggtaagacaatatgaacaaactatgatcacagtgactttacaggaggttgtggatgctccagggcanccttcacccttgctcttctttctgagaagttggcttaaggcagaccaaganctgctggcccttttaaggaatatgttcaatgccaaaggtaaaaaaattntgaaattggtccccaaatncccgggcattgcctttcgccactttnggcttcttcctggnganccccacctttgaccggtgggggccgtanacnttgacaacnn

SEQ ID NO: 770 - DNA, 508 bp, Homo sapiens
  misc_feature (1)...(508): n = A,T,C or G
ggacaaaaccagctgaagatgaaagtgtggagacccaggtgaatgacagcatcagtgctgagacagcagagcagatggatgtagatcagcaggagcacagtgctgaagagggttctgtttgtgatcccccacccgctaccaaagctgactctgtggacgttgaagtgagggtgccagaaaaccatgcatctaaagttgaaggtgataataccaaagaaagagacttggatagagccagtgagaaggtggaacctagagatgaagatttggtggtagctcagcaaataaatgcccaaaggcccgagccccagtcagacaatgattccagtgccacgtgcagcgctgatgaggatgtggatggagagccagagaggcagagaatgtttcctatggactcaaagcctttactgntaaaccccactggatctatactcgnctcatcttccggtnaaacccaattcnctgggatctggcccaanttnancattnancttgggntattncnncc

SEQ ID NO: 771 - DNA, 587 bp, Homo sapiens
  misc_feature (1)...(587): n = A,T,C or G
acttgttttgggaatatatgagagaagaaactgctgagcaggtcagtaaagaacagtccatttcagctgcaggacagttctctttcccgggacaagcctacatagcctccaagggagccaaactatcccttccatgcaacaagacaccttgcatggatactctagccatgacttgcttttggacaaaaatcaactgctaacgtttttcatctctaatatcattaacaccatggagaaaaaagaaaaaaattcaaccctagaaaacttgacaacgagaataagaaaatccacaaggaaaggtcatgctaaaactgatttgacagttgttccatcaccgcctaccacatgggcttgagactggtgacttcatggatgcatcccttcgatgccctgccaaatgtcagcttcaagtctgtcagtgaccccagtgtgatgctgcctgccttctattcaccaactnctattcaagagatccaagggggccttgggccgtggtaagcacanggacacncaggtgccaagaagccccagnaacccttttagaaaactttgncctgggatttgggccccggnaaccaaccngtggn

SEQ ID NO: 772 - DNA, 577 bp, Homo sapiens
  misc_feature (1)...(577): n = A,T,C or G
ggtacactgcaggagagtgcctggcaaaaagatcaaatggggctgggacttctcattggccaacctgcctttccccagaaggagtgatttttctatcggcacaaaagcactatatggactggtaatggttacaggttcagagattacccagtgaggccttattcctcccttccccccaaaactgacacctttgttagccacctccccacccacatacatttctgccagtgttcacaatgacactcagcggccatgtctggacatgagtgcccagggaatatgcccaagctatgccttgtcctcttgtcctgtttgcatttcactgggagcttgcactatgcagctccagtttcctgcagtgatcagggtcctgcaagcagtggggaagggggccaaggtattggaggactccctccagctttggaagcctcatccgcgtgtgtgtgtgtgtatgtgtagacaagctcttngctctgtcacccaagctggaattgcantggtgcaatcatggttcacttgcagtcttgaccttttggctcaagtgatccttccacctnacctcctgagtactgggacc

SEQ ID NO: 773 - DNA, 580 bp, Homo sapiens
  misc_feature (1)...(580): n = A,T,C or G
ggtaccacctcctgttcctacaaaaccaaaacagattaatttgccttattttggacaaactaatcagccaccttcagacattaagccagacggaagttctcagcagttgtcaacagttgttccgtccatgggaactaaaccaaaaccagcagggcagcagccgagagtgctgctatctcccagcataccttcggttggccaagaccagaccctttctccaggttctaagcaagaaagtccacctgctgctgccgtccggccctttactccccagccttccaaagacaccttacttccacccttcagaaaaccccagaccgtggcagcaagttcaatatattccatgtatacgcaacagcaggcgccaggaaaaaacttcagcaggctgtgcagagcgcgttgaccaagactcataccagagggccacacttttcaagtgtatatggtaagcctgtaattgctgntgnccaaaatcaacagcagcacccagagacatttattcaatagccagggcaagcctggcagtcagaacctgaacagacctgttctttagttcaggagaaccntgaaacnaaagaat

SEQ ID NO: 774 - DNA, 680 bp, Homo sapiens
  misc_feature (1)...(680): n = A,T,C or G
ggtacctggccatgggcttccctcccacacctgccaggacacagcctgcaggtcagggggctaaactggggagttttctccaaagttgggaaaggatgggaagagtaggtgggaatggggaagttacacagctacagcagtcaggcctgtttagtaagaagaatcacatttaatgagtttctttcttgcagtttcagatgctcaagtacaagtaagttatatgacaacgataacacacaggaggaaagccacggaagcacactgttgtgaagttctcatgctctacgtgaagtgttatcttttttttctaagtgacagcaagtttattaagaaagtaaaggaataaaaggaatggctatttcattggcagagcaccaataaaatcatctgaaggnagattgtgatgagttaaangcgtatatgataaacctgaagaccaacnagaaantagcccacngagatntagtggattaagttaaccaagggaattaacttgaatcattaaaaattcttaatctgggggaacctttnaanaangggagcttaccccttggggcaatttnaaaccnaaagccaggttgattgaatttaagcttaccttttttcaataatcccttttaaannaanggtttnaacctttcncttaaanggcnnnanttttcnaattggantttaagccg

SEQ ID NO: 775 - DNA, 658 bp, Homo sapiens
  misc_feature (1)...(658): n = A,T,C or G
ggtacctgtgccagatgaaaggtttgactttctttgtcaataccacaaaccagcaagcaaaattcctgcctttctaaatgtggtggatattgctggccttgtgaaaggagctcacaatgggcagggcctggggaatgcttttttatctcatattagtgcctgtgatggcatctttcatctaacacgtgcttttgaagatgatgatatcacgcacgttgaaggaagtgtagatcctattcgagatatagaaataatacatgaagagcttcagcttaaagatgaggaaatgattgggcccattatagataaactagaaaaggtggctgtgagaggaggagataaaaaactaaaacctgaatatgatataatgtgcaaagtaaaatcctgggttatagatcaaaaagaaacctggtcgcttctatcatgattggaatgaccaagagattgaagtggtgaataaacccttaattttgactcnaaanccatggnctacttggtnaacnttctgaaaaagcttcntttgaaggaaaccaanggtgataaaattaagaaggggtggccagtttanccagggccttggcatcctttaagggggcttggaccttaagttccanaattgatcttanggnaanccaagttttggaaccacctgncccaa

SEQ ID NO: 776 - DNA, 659 bp, Homo sapiens
  misc_feature (1)...(659): n = A,T,C or G
ggtactttacggcctgatctaattgaaagtgcatcccttgttgcaagtggcaaagctgaactcatcaaaacccatcacaatgacacagagctcatcagaaggttgagagaggagggaaaagtaatagaacctctgaaagattttcataaagatgaagtgagaattttgggcagagaacttggacttccagaagagttagtttccaggcatccatttccaggtcctggcctggcaatcagagtaatatgtgctgaagaaccttatatttgtaaggactttcctgaaaccaacaatattttgaaaatagtagctgatttttcttgcaagtgttaaaaagccacataccctattcagagagtcaaagcctgcacaacagaagaggatcaggagaagctgatgccaaataccagtctgcattcctgaatgccttcttgctgccaattaaaacttnaggtgtncanggtgaactggnngtnctaccgntnccngnngnggaatntcaggnaaagatgaaccctgctgggnaatcncttattttcnggntangnntaaaccttngatggggccaaccttaccnggtggttattttttggncccccnntaaagaacctcntnaaangtnccccntttttganacgggggnttaaacctncccgggg

SEQ ID NO: 777 - DNA, 728 bp, Homo sapiens
  misc_feature (1)...(728): n = A,T,C or G
acttcttgcatgttgtcacatgttgctgtgagaatcaggtgctgcctatatggctccactgggagagggcagatggaagccgtcgcctcatctgtcgtggaacgtgtgctgtgcacctcctccctttgctgatcttaatctctgtccttttactgtaataaactgtaactgtgagcctaacagctttcctgagtctagtgagtccttctagcaaatgaaaggagggtggtcttggagacctatgaacttgcacctgcccccgtcgttttgagggtctggcacaggggagggaagggctgggcctcttttggaagggggtcttcaatccatttgggggtcggggtcccaacttcttggangggcccaacgttccttgcccagcttccaagnctcttcttcccttcttaagtccccganccttgcaacctttgggcccctntggcttgtggaatcctgggaaaaaacttngtctttttnnttancacttgaatnngaanaactggcccattaactnaagcccttgcatnncttngactncttnnatgggcaaccttnaagggattcccaagggncccctgggtttanggaaataatggggggaaaattttttnggaanttnaanaataanccccccccaaaancggggganccttngggcccgnaaccccccttaagggccnaaattccngncanatntgggggggccggtnctaaggggatcccaaccc

SEQ ID NO: 778 - DNA, 603 bp, Homo sapiens
  misc_feature (1)...(603): n = A,T,C or G
caggtacactgctgccactgttgtgtcctcgctctgcttgctgttgcctcacgccaggccccgtcctgccgtgacacccttcatcctacccttggaaccccaaggccaagttggttcaaactgttggagaacagagttggcctgcatctggaacacacttgtcctcagcttaccatctcctcacaccccagagtggaaaggtgaacacctgcagctgaggcttggaaacgtttcttgtgttgccctgaaaaatctttgagacctcagggaggctctgtctctcttaaaaggtggagaaagatgccattctctccctaaggtctggtggagtctccccatcttgcatacccttctgcaagccatctatctctgctcactctccaattgacccgcctgggaacaagggatgaaggaggaagttgggggcttgggggaatcctgccagttggtgaancctgtggcangaaggatatgtgacntagagatcctgatcttttntnancctgctgttggttggcttgnatatatggatggtgactgtttgnaaagnggagtataagatgccntgctgatnggngtatgctatgctnttangatggactg

SEQ ID NO: 779 - DNA, 654 bp, Homo sapiens
  misc_feature (1)...(654): n = A,T,C or G
cgaggttttttttttttttttttccagttagtgatgtcgtatttcaaaataggtcgaaacttcagagaaatgaaaatcgggatatcagtgaagttattgctctcggtgttcctaatcctcggacttccaatgaagttcagtatgaccaaaggctnttcaaccaatccaagggtatggacagtggatttgcaggtggagaagatgaaatttataatgtttatgatcaagcctggagaggtggtaaagatatggcccagagtatttataggcccagtaaaaatntggacaaggacatgtatggtgatgacctagaagccagaataaagaccaacagatttgttcccgacaaggagttttctggttcaaaccgtaaacngagaggccgagaaggaccagtgcagtttgaggaaaatccttttggtttggacaagtttttggaaaaaacccaacngcatggnggctntaaaagacccttagataccacccgcncaaggacnnagcctgaagccagaaaaggnggaaggattggccaggttttccaagngaatgactttancctaacctaangagccagnttnggggacccttntaaagggccggtaaaaccnatttggggcccannccnccttnttttttctgggaaanggggggtta

SEQ ID NO: 780 - DNA, 570 bp, Homo sapiens
  misc_feature (1)...(570): n = A,T,C or G
acagtgggcacaaaacctgtgcagagtccgcagaagaggccaataaccaagcgacccaggatcagcatttcaaccgacttagctactttacacagtcccataaagcagccaccagtgacagccaacaggttgacaatcagcattgaattgcgcctgccaaagcggttgacgaagagtccgacggaaaaggagccgatcataccccngacggaaaatatggccacagacaaggaccagagagacgtgagcagcacctcagagggtggggcatttcccttgccgtcaaagttttattgataaattcctttatgatcttctcaggagcattgatgaccccagtggttgtaaccnaattggaaagaaccgattgnagccactggtgatggccaatatcaaanctggggtgaccttctggggccccatcgctggaatctaattcaagtctttaagaaagatctangggtgatttcagaaacnagnttttnaggccacaaacctttaaanggccttttaacagcaaggtttnttcccgtcttaggaaggatncnaanccnttggccggaaccncct

SEQ ID NO: 781 - DNA, 664 bp, Homo sapiens
  misc_feature (1)...(664): n = A,T,C or G
acccaaagttctctggggagggccagggaagaggctgggtgtcaaaccaaacagatttttatttgcagtcgtcactggggccgtttcttgctgcttatttgtctgctagcctgctcttccagctgcatggccaggcgcaaggccttgatgacatctcgcagggctgagaaatgcttggcttgctgggccagagcagattccgctttgttcacaaaggtctccaggtcatagtctggctgctcggtcatctcagagagctcaagccaagtctggtccttgctgtatgatctccttgagctcttccatagccttctcctccagcttcctgatctgaagtcatggctttcgttaaaactggacatctgggaaagacagtccttctctttcttggataaattggcctggaatcancgccccggtaaaacaagctttcatctttctggttccantttnattaactggttttcactnggnccactgngggggcttancttcttgacctggctggnaaatttaaggnggttnaagnttnttncccggacctattncntggnnaaaaccngggaatnatgcnagncttaaaattttncccaangaaggagtccttaanaccnggntaanttggntttacggaacngggtggnnaccttgttttnccaggncc

SEQ ID NO: 782 - DNA, 669 bp, Homo sapiens
  misc_feature (1)...(669): n = A,T,C or G
caggtacaagcttttttttttttttttttttttttggaatagaatacaactttattttcagtcatttctatttccttggttatgaacaaaggtagcaaagtgcagttgtatcagcagtgccaatagaaattacagagtttttcatatccctttacagtttgccacaggtatcttaaaatattgnttacactcatctctcttcagtttaccattgtttaataggcctaccctcgatctttttattcaatatgttaataaagaaacctatacacatagtatcaccgttatcattttaaaaatattttgacactgnatataaatataactagcttactttggaatcctacctattttaatggtgnatgaaaatattattctgaaattagccnggcntggnggtgcatgcctanaggcccagctacttgggaagcttaagggggaaggatccctgaacccaaggganggccangnttcnggganctnggatgnncaatggcttcancctnggnaatngaatggganccctttttaaaggaaaggaaanggaaatttggattttggnaacnganncctggnccaaaaaagggcaaaanccctgctggaanggccctntggaccttaaatgccccnnccaaangnggnnattnccatttaannggncccncaggg

SEQ ID NO: 783 - DNA, 735 bp, Homo sapiens
  misc_feature (1)...(735): n = A,T,C or G
acacagaagcagtgaaggactgcacagaagccctcaagctggatggaaagaacgtgaaggcattctacagacgggctcaagcccacaaagcactcaaggactataaatccagctttgcagacatcagcaacctcctacagattgagcctaggaatggtcctgcacagaagttgcggcaggaagtgaagcagaacctacactaaaaacccaacagggcaactggaacccctgcctgaccttacccagagaagccatgggccacctgctctgtgcccgctcctgaaacccagcatgccccaagtgagctctgaagccccctcctcaatcccttgatggcctccaccctgtaagaagctttgctttggtcaaattaaacttaagtgtaatcaaaccccagaccatgggtggttgcacccagaaagggncccactnagaacctaaacgttgaagctgnaactttngcccctaattcccnaagcccaagttagcttgatcccnccaccggaatccttatttagccaaagccntttngggntttggncctggncccaaanggggctttgaaaaactggaaggcttggcccnttggaagctttnccccaaaanccccaaatttaattggggagntnattttggaacnaaccttgggctttttngggccccgggtttggaaaggaaggggggataaaaccttaagggccctggttccaaaannanccctttttnaaccggggn

SEQ ID NO: 784 - DNA, 660 bp, Homo sapiens
  misc_feature (1)...(660): n = A,T,C or G
cgaggtacacattgtattatatacaaacaagcaacaacaaaaagtttcatcatgtaaacaaaagaatataaattatagacataattggaagtttcaaacagtccttaaatcattgtgagcttctctaaaaggcacaggtcttggagtgtgggcacagagccattagtcagatgtctgggtggtctcccataatagcaatgtatactctaaagtgggctttttgtgaactctgtcagggtgaatgagttaggcctcttaaaggaatgaaatgctttcacatttggggcaacaagtgaaaaatactgaaaggagggatacaactagggttagatttattggtgacagtgattttagaaataccactaaaaaggtggtaaaagatttctagattaaattctgactactgnaaatnagaaaggatccttttgnanctctaccaatggttngtgaaaaattaaaagggagaaagtgacccaggagaaaccnaattgggaagctanggaggttccagaaaatncccagtcttacacgaaaaaaccttganagggcctttttaaggccaannttgggaaattacctttgtaacttaacttgaaaaanacctgccggcggccgttnaaaggncaattnaccnctggnggccgtcttagggnccncctc

SEQ ID NO: 785 - DNA, 254 bp, Homo sapiens
actgctgctggttaaggtcaacctggggtgcaatgctgctgtcttcatcttcggtcccgaagtaatgctcaataagatcaaaggccttttggtagatctcctggttttcatgactctgtaagaactcaattttatccagaccataagcttcttcaatcaaagcacagtaagggttaatgccagtgccattccttttggcttcctgttctccaagcctcaggatattttccaagccatttagggcaacctgtacc

SEQ ID NO: 786 - DNA, 688 bp, Homo sapiens
  misc_feature (1)...(688): n = A,T,C or G
ggtactggctgagctggaagtgccaaaaagcactcctggctgcttctggttccatctgatgatgatgtgacacacactgctgaaaaggcccaagcagggcaagtgggatggctgaaggagggaaggagggggttcagaacccactggcctggatgggagaactgggtggaggcttccccaagagggaagacagataaacaaaacaaaacaaaaactgggtaaagaggaatgaatcactcagccctgatgtttcaattctacactgcattcctggccagtcgcatttgtttaatgcaggcatggccacagctctcctagagaattatctcaaagacccagaagggacctggangaggcctatttcttaaggttttccagttggaccaagggaangantgggttcacttagcttctaaaaaaggntttgaaccctaaggttaactgcctccggaagctgcttgcttttggtttggcttcccaaaaaggnttcagaatagntttggaccccttanggaaacttggatcaagcccggnaanccaanacttncttggtngnaaaatcaaggggggctncttggggnttanccggaagtttgggncaggntgtnttaacagggtggggantgaccanccnggngcccaggggccttantaacnttgggaancccctgnganggaanccttnacc

SEQ ID NO: 787 - DNA, 708 bp, Homo sapiens
  misc_feature (1)...(708): n = A,T,C or G
acagtaacacaacatcaaaagcaacacaggctgtatacagaaacgtgggtcattcttttcagccctaatggagatgtaattaacagtatcgagcactctggaaaatcactctgcaggtttatatggactacatggagatcatatcctgtagtgtagtgaaagctaagtcctcaagagccatatgtatagatacacaatgttttttaataatctttaaaacagagatcaaagttcatttaagtcctgtttgcattaacaaaaataaaaatgaaataaaaatgggaaccaaatggatcatctaaaaggtttaaaaattcctaaattgnccaatttatccaactggtgggagacttaattcagggttttggaaagtccaggactggtttcagctgaacccagaaggcccccaattttgcttactggaactggccctggggtaagncatggaattaaaatngcttancnccttcccctnggttttgaacttttggccggttngaattattggttaaaggcaggctttaaaccaagtttnccaacctgggctatttaacttggatcccattgggaaaaattttcaaanggaaattttttattaggggccatttcaatcnaanggaaaattntgggaactttggaaatnccgantccttgntggaaanaaaaaacccnggggaaatgggnngggggnccttnggcccccaaccc

SEQ ID NO: 788 - DNA, 647 bp, Homo sapiens
  misc_feature (1)...(647): n = A,T,C or G
ggtactctgtctgctgagggaatggggtattttgactcccatagaaagcactagcctaagtcaccaaatgactgcttggtccccactgaagcagtgtagctctccatagtatttttggtggttatggattacatgtgtggccagctcatgctttttcttgagcaggggctgtccatgacctgtgctcataccatgctttctaagttctctttggacagggcctcagctgctgcctcagcctgagtttcagagggtgtgtaggagtcctggtaatcttgaagcagtttgaccacctccaaatggttgaactgcacagcatcatccaggggaatggtgcccacctgtccttggcaaaaggattcactttgcaagccttgatcaggaatttaacaacttcgaatgtgcccttanctgcagcaacatgcnaanctgggcnccaagcataagctttctggtccatatccatggctgacaaggcaacctttnaanancttancattggcnctntnngcngcaaataccaggtggccnnagcttggtcccaattntggccttacncccggggntaantccaaccaangccttaggtncaaattnggaaattgaananaccccactttggcaaactggcccctnggttgncccat

SEQ ID NO: 789 - DNA, 650 bp, Homo sapiens
  misc_feature (1)...(650): n = A,T,C or G
acctgcgcgccctcgacgtcaatgtggccttgcgcaaaatcgccaacttgctgaagccagacaaagagatcgtgcaggacggtgaccatatgatcatccgcacgctgagcacttttaggaactacatcatggacttccaggttgggaaggagtttgaggaggatctgacaggcatagatgaccgcaagtgcatgacaacagtgagctgggacggagacaagctccagtgtgtgcagaagggtgagaaggaggggcgtggctggacccagtggatcgagggtgatgagctgcacctggagatgagagtggaaggtgtggtctgcaagcaagtattcaagaaggtgcagtgaagcccaggcagacnaccttgtcccaaaggaatcagcaaggatgtgtgggccaagatccccctntttgcccagcatgaggcaaaaatgtncagccaccccaggctttnntaacanagctggctcttggttttggcacttttccttttcttaaacaaacctgccattaagnganttggggttcaaaaaaaaaaattntnnnanaataaaaantttttntcttcgcaccnccttnnggggaaacncnantgnggcggtntnttggancnctnntccncnttgggnntangtataatntttttt

SEQ ID NO: 790 - DNA, 646 bp, Homo sapiens
  misc_feature (1)...(646): n = A,T,C or G
gggtaattccggctgttgcaccatggcgtccatggggaccctcgccttcgatgaatatgggcgccctttcctcatcatcaaggatcaggaccgcaagtcccgtcttatgggacttgaggccctcaagtctcatataatggcagcaaaggctgtagcaaatacaatgagaacatcacttggaccaaatgggcttgataagatgatggtggataaggatggggatgtgactgtaactaatgatggggccaccatcttaagcatgatggatgttgatcatcagattgccaagctgatggtggaactgnccaagtctcaggatgatgaaattggagatggaaccacaggagtggttgtcctggctggtgccttggtagaagaagcggagcaattgctanacccaggcattcacccaatcagaatannccatngctattaacaagctgnttcccgttgctattgaacactggacaagaacaacgataccnccctggtgacttaanggcaccgaaccctgattaaaccgnaaaccccnctnggttcaagnggnacagttgcncccccnatngttaaatctggangccgcctnttgcccanttggacggaaacnttatttgctttcaattaaggcaatggccgcagntgagan

SEQ ID NO: 791 - DNA, 656 bp, Homo sapiens
  misc_feature (1)...(656): n = A,T,C or G
accatgatatctggcagatgtataagaaggcagaggcttccttttggaccgccgaggaggtggacctctccaaggacattcagcactgggaatccctgaaacccgaggagagatattttatatcccatgttctggctttctttgcagcaagcgatggcatagtaaatgaaaacttggtggagcgatttagccaagaagttcagattacagaagcccgctgtttctatggcttccaaattgccatggaaaacatacattctgaaatgtatagtcttcttattgacacttacataaaagatcccaaagaaagggaatttctcctcaatgccattgaaacgatgccttgtgtcaagaagaaggcagactgggcccttgcgctggattggggaccaagaggctacctatggtgaacgtgttgtaacctttgctgcntggaaggcatttcttttccggtcttttgcgcgatattctggcttaagaaacgaggctgagcctggcctacantttctaangaacttattaccganattaagggttacnctgggatttgcttgcctgaagttnaacccctgggacctnggccgnaccccntangggcaattccanccactggngggccgtactaagggaaccaacttgggcccaacntggggnat

SEQ ID NO: 792 - DNA, 640 bp, Homo sapiens
  misc_feature (1)...(640): n = A,T,C or G
ggtctgacacaatcagaaattcgagacatcatcctgggtatggagatctcggcaccgtcacagcagcggcagcagatcgctgagatcgagaagcagaccaaggaacaatcgcagctgacggcaacacagactcgcactgtcaacaagcatggcgatgagatcatcacctccaccaccagcaactatgagacccagactttctcatccaagactgagtggagggtcagggccatctctgctgccaacctgcacctaaggaccaatcacatctatgtttcatctgacgacatcaaggagactggctacacctacatccttcccaaagaatgtgcttaagaaagttcatctgcatatctgaccttcgggcccaaattgcaggatacctatatggggtgagcccaccagatacccccaggtgaaagagatcccctgcattgtgatggtgccccaatggggccttaccanaacgngcacctgctggcaantgnctaactgagacctgcccggcggccgttcaanggcaattcngnnactggnggccgtctaagggaccnacttgggccaacttgggnaatatggcnnactggtcctggggaatggtntccgtccattcccanttcanccggaanctaanggtaac

SEQ ID NO: 793 - DNA, 615 bp, Homo sapiens
  misc_feature (1)...(615): n = A,T,C or G
acctacaactatatctactccattttccaaaacagagagctgatcccgggctgcaacacctccaattatcagaagctcccttaatttaggattatcaatgtatttcttaaactgcttgatgttattcaaagtttgttcagctaactcccgggaaggttcaacaatgagagctttcggagcattggggagaaactttgtttgtgtcacctgtgcattacctgagtgctgtgatttgacaatgtaaccatccggtgccttggaaagagcaacaaagccatcttttggtggaaacttaaattcctcttcacccgaagttaaatttcagttcagcattcttcaaaacacaggcaggaaagagggcttggtttttcatatgtggtggtatttcaaatgccagaccaagancttttccatttttggagaacttgacatgtccttatctatatcnngtacatccatgggatcatgcctagngaatnctttcataatatcaaatggtggtatggaatcttcctgtccccaagccaatccaactggagaccttggcggcccntanggcaatcancctgngccgctaggnccactggccactggnacaggcnntgtctggaatgn

SEQ ID NO: 794 - DNA, 709 bp, Homo sapiens
  misc_feature (1)...(709): n = A,T,C or G
acttctgaataagttcagagccaaccactctcaagaaagtggctgaggtttggtttgctactgctttggctaacaaggttttacctgtgccaggtggaccatagagaatgacccccttaggaggctttatacccatctcttcataatattcaggatgggcgagaggaagctccacagattccttaatttcctgaatttggttgtccaaccccccaatatctgcataggtctcctggggggccttttctaccttcatcactgtgaccaggggatccgtgtcatccatcagcacccctatcacggnatgcaccttgtggttgagcaggaccgagcagccaggttccagcagatccttgctacaaatgaaagaatgctgacgtantgttctgagcccacagatgtagacacgaatggcatgatggcatcaatgatctctttccaaggttcctactgacatcggggtccccctcagaatcatccacttttggatctttccttcntcttgnttttccttctaaaggggttcaatttggtncccggatttcttaagngaatctttccttncnttgaaaaaaaaaaggccnttnaaatnctnttttaacctttangnaanttttaaacccgggccttgaattnnnaagggggcnccccngggggcaattttncttggcnnnaatttggggcccctttgggnttnnttttttttttt

SEQ ID NO: 795 - DNA, 693 bp, Homo sapiens
  misc_feature (1)...(693): n = A,T,C or G
ggtacggcaatcaatcttaataatccagagagccagtccatgcatttggaaaccagacttgttcagctggacagtgctatcagcatggaattgtggcaggaagcattcaaagctgtggaagatattcacgggctattctccttgtctaaaaaaccacctaaacctcagttgatggcaaattactataacaaagtctcaactgtgttttggaaatctggaaatgctctttttcatgcatctacactccatcgtctttaccatctctctagagaaatgagaaagaatctcacacaagacgagatgcaaagaatgtctactagagtccttttagccactctttccatccctattactcctgagccgtacatgtgcataggaactgggatatacacaggcacagggataggcactggaacatattctgnctncaagtatcatctgctgaccaagaattggnctgcatgtgaaggttacagtaagtacttttggcattggtaaanggttgccaaaaaactgntttggnccttnancnctttggtaaggggttggaaaaaggggtggggcttaaacctggcantttnggttcnanaagtntggaaancctgggancttaagggaaggtttttangggccnttttgaaatggcaatgtgggcncaatttggtggcccgtnaaaaccccntanncaaggtn

SEQ ID NO: 796 - DNA, 452 bp, Homo sapiens
  misc_feature (1)...(452): n = A,T,C or G
ggtacattcacgtctcccggccgcttcacctgaaagccatcggtctcctgggtagtggcggtcctgtgccattctaccagatggttgtctggcccatacaggtctttgtccagttcaatcaccaaggatttaaaaaaggaagagaacttcctcttttgtttagtggcatcatatttggacaaggctgaatcctccaggagccgtccttctacccgaagctcccaggaagccaccgtcccttccccatcctcggcatctgacttagccggattgaaagtgttagaaatgaaaattcgcagcttccgtttttgcttgatgggacgtttcaaggcctcttggatatctagccgttcctcatgatagtctggtccagttcctttcaaaagccaagagatccatataggcctgggattctggtacctgccnggccggcgctcnaanggccaattcaa

SEQ ID NO: 797 - DNA, 333 bp, Homo sapiens
  misc_feature (1)...(333): n = A,T,C or G
ggtacaagctttttttttttttttttttttttttttattangcgcaagtggtcaaaagttgtcaaaattgtcctcattcctcgattgtctcttttttaccagtctcttgcccttcaaacagaggatacctggcctccacatcagcccatgtgatgttgccattggctaggtcttggactatgctgggcagctcagagatctctgctcttatctgccgcattgagtcacggtccctcagagttgcagtgtggggggtcttgttcactgtgtcaaagtcaatggtgacaccaaaagccacgccaatctcatcaagtcctggcatancgccttccg

SEQ ID NO: 798 - DNA, 632 bp, Homo sapiens
  misc_feature (1)...(632): n = A,T,C or G
ggtgcttttttttttttttttttttttttttttttggacacagatcactttattggcatggctttgttttaagaaaaggaaaagtgacaaagccaagagacagactctgctaacagatgcctgggggtggctggacatttttgcctcatgctgtgcaaagagggggatcctggcccacacatcctgctgattccttgggacaaggttgtctgcctgggcctcantgcaccttcttgaatacttgcttgcagaccacaccttccactctcatctccaggtgcagntcatcaccctcgatccactgggtccagccacgcccctccttctcacccttctgcacacactggagcttgnctccgccnagctcactgntgcatgcacttgcggcatctatgcctgncaaatcctcnttaaactctttnccaacctggaagtncatggatgtagtcctaaaagtgctancgngccgatgatcatatggncaccggnctgnaccnacttttggctggcttancaagttgcaattgcnnaggccattgacttaggcnccagtcttcccggcgccgtnaaggcaatcnccattggcggnntctagggnccnntggncagttggtnatnggcaantntcngga

SEQ ID NO: 799 - DNA, 462 bp, Homo sapiens
  misc_feature (1)...(462): n = A,T,C or G
ggtactgcgtctgtttttgttaccccacaaggaccagcgccagatgttctttgtgatcagcctggatcccccaatcaagcaaggccaaactcgctaccacttcctgatcctcctcttctccaaggacgaggacatttcgttgactctgaacatgaacgaggaagaagtggagaagcgctttgagggtcggctcaccaagaacatgtcaggatccctctatgagatggtcagccgggtcatgaaagcactggtaaaccgcaagatcacagtgccaggcaacttccaagggcactcaggggcccagtgcattacctgttcctacaaggcaaagctcaggactgctctacccgctggagcggggcttcatctacgtccacaaagccacctgtgcacatncgcttcgatgagactcctttgcaacntttgtcgtggtacctgcccggccggncgttcgaaanggcc

SEQ ID NO: 800 - DNA, 702 bp, Homo sapiens
  misc_feature (1)...(702): n = A,T,C or G
gaggtgtcctcccctccaagcagaccacctgtccccttctatcccagctcagagcagctgacccaactcagaatctctttcctacaggatgaagtgccttttgaatgttattttaagccgagagttaatttttctacacaacatatttccagacatcttttagtcttttattgtcttagatactataagaagatgaacatgacaattttctagaacctggtagcgtgtgtgtgtgtggcggggggtgctgagggaggggagtgagtcacaggagcctgtcccccaacaggtgtgattgctctgacaacctgtggcatgctgcagggtcaggctcctgataggaggatttcatgactatgtcattgnctccactcatttttgacccagtttggaatgtatctgcaattggtgtggctcaacactttaggaaacaatagaattattttatataataattctgatggtgaccaagtttngncttggagggccacaattttcttcctttgaaaaagtggacantncctggncacttctggntttttaaaacttactnggccattccattttgggggtttttttgggnnggtaaattgggtttgggggttaaaaacccgtttnccagggaaaancccctaaaaaanccctttggggaattttaaaanggaaaaattctgggntaaattngggnttttttaaaaaccc

SEQ ID NO: 801 - DNA, 719 bp, Homo sapiens
  misc_feature (1)...(719): n = A,T,C or G
aggtactgcccagagaattttgtagacatcaagaaaactttggaacgagagactcgccagtgccaggctctggtgatctggactgactgtgatagagaaggcgaaaacatcgggtttgagattatccacgtgtgtaaggctgtaaagcccaatctgcaggtgttgcgagcccgattctctgagatcacaccccatgccgtcaggacagcttgtgaaaacctgaccgagcctgatcagagggtgagcgatgctgtggatgtgaggcaggagctggacctgaggattggagctgcctttactaggttccagaccctgcggcttcagaggatttttcctgaggtgctggcagagcagctcatcagttacggcagctgccagttccccacactgggctttgtggtggaaccggttcaaagccattcaggcttttgnacccttggggccgnnaacaccttaagggccgaatttccagcacaactgggcgggccgttactaagngggantnccgaacttngggnancccaagctttgggcgtnaatcattngggncataaacttgggttnccctggnggngnaaaattgggntaatcccggtttnacaaatttccccccccaactttttccnaaaccccgggaaagccttttaaaaggggtnaaaaacccctngggggnggcccctaaatggagtnggggnctttaaccttcncccttttanant

SEQ ID NO: 802 - DNA, 646 bp, Homo sapiens
  misc_feature (1)...(646): n = A,T,C or G
actcatcgccattgacctggcctataacttgcacagtgcctatggaaactggttcccaggcagcaagcctctcatacaacaggccatggccaagatcatgaaggcaaaccctgccctgtatgtgttacgtgaacggatccgcaaggggctacagctctattcatctgaacccactgagccttatttgtcttctcagaactatggtgagctcttctccaaccagattatctggtttgtggatgacaccaacgtctacagagtgactattcacaagacctttgaagggaacttgacaaccaagcccatcaacggagccatcttcatcttcaacccacgcacagggcagctgttcctcaagataatccacacgtccgtgtgggccgggacagaagcgtttggggcagttggctaagtggaagacagctgangaggtggccggcctggatccgacttctggcttgtggaaggaacagcccaagccagaatcattggcanccaggaanggcatgctngacccactngaaggngcccttactnggacttccccaaaattgggcattaaagggntcngggcttcnaattcccttttcaggccnggtttnanggngggaaaaattcggggaatttnatccttaaagccnttgnc

SEQ ID NO: 803 - DNA, 544 bp, Homo sapiens
  misc_feature (1)...(544): n = A,T,C or G
acacgtcgtcctcccggctcaggccctcaaagaaggggatgaggtccagcagctccgtgtccgtcatgtcatcgaaccaggactgcacaggcactgcattctcaggatggaagatgtatgaggcaggggaattgtcaacaatgatcactttgctcagctcccgcccaaggcgactcaggtccttcacgtagttcccacgatgaaaaacacatgattctctgaagagccgggcccggaacacaccccagcggtctaggaggtcagccacagggtctgcatacttggccaagctggcagtaaagagcacacattcaaaaagctgcccatcctctggaggaactcgtccacatgtggccgcttcagcacatacacctgatgtatagttccatcgattcaaccggaacaataaaatnagcantactaaataggcttaaaacgaactgtgcaccaatggttcattctaaatcaatggaccacccattcttttccatagtcnagcaccggtacctntggaanaangtnccttgggcgngnacccccttan

SEQ ID NO: 804 - DNA, 642 bp, Homo sapiens
  misc_feature (1)...(642): n = A,T,C or G
cgaggtacatccttgtgggagagaacctcatcaatttccacatttcttccaagttctcttgccctgagacggattctcatcgctttggaaggcacctgaaagaagcaatgactgacatcatcactttgtttggtctcagttctaattccaaaaagtaattccactggagctgctgggaaggaaaacgagctcttctgatgcaaaccaaatgaaaaataggcattaatcctgaccttagctcgggatgaaacactgctcttaaaaaaactcagttttccttccagaaaatgtgggtgtttttttttcctagaacagtatctctcccctgtgaagcataaccccactacttccagacttgccctcccttgggggacatctgataaagtctcccctgatgtctccgcatcggcttggattattaagggatgcaaatcttggtgagttaatnaangaattantangggtgtggntttacccnccagtggaatggaaatnggngtgctttntantnggcaanncgaaggcctaagctttanggcctttaacctttntccangcngggtaaacttttggtttgntnaaaanaaaantnnttnttaaagttggggncccanttgagctaaccatttgganngcctaccc

SEQ ID NO: 805 - DNA, 261 bp, Homo sapiens
cgaggtactacagagcccctggacggtgtgatgttggaaaaggatgttttttctcaacctgaaattagtaatgaggctgttaatttgacaaatgttttaccagctgataattcatcaacaggatgctctaaatttgtcgttatagaacctataagtgaattgcaggaatttgaaaacatcaagtcatccacatcattaactcttacagttcgaagttcacctgctccttcagaaaatactcatatttctcctttgaaatgt

SEQ ID NO: 806 - DNA, 311 bp, Homo sapiens
gcggagagcggctgatcgcagtccggaggtgaggcggaactctgagcaggtggtccattatggctgacatgcaaaatctggtagaaagattggagagggcagtgggccgcctggaggcagtatctcatacctctgacatgcaccgtgggtatgcagacagtccttcaaaagcaggagcagctccatatgtgcaggcatttgactcgctgcttgctggtcctgtggcagagtactccagttctcagccagaaccccgcacaggtctttccttatgggataccagcccctcatacattgataaattgggtacc

SEQ ID NO: 807 - DNA, 591 bp, Homo sapiens
  misc_feature (1)...(591): n = A,T,C or G
ggtacctgttctttgccagttaagatacatatcttattatctttgtttttttcaagtctatgctcctgtttgaagcttttcctgtaatttaggttgtctgtgaaatacctataacatataattcctatagagtatgccacattttttttctaactcatttcaaatgaaattctctcagattctagtttttgagcttgtccactagatctgaaaataaagcatcctttcctgagtccacttgaactaattgtgaatttgttacttaatttactggcatcttgggaaacaagttttgctgtggcaggaaggctgttttgagagtgagccgttgaagtctactctggtttgtggatgacattgcattaggggttatttcctgnattaccagtgcccccttgtggcaatatactttatgacttggaatgcaacaccacttttaaaagcctggtttcaagttttgaaagcattggttctgtgntgccataatctgaagnttctgtgaaggattattnaagctttaaaccttncaaggtaaaggccaaattaggcctggaattacctggaccttggncaaaaattnaaanattncnn

SEQ ID NO: 808 - DNA, 641 bp, Homo sapiens
  misc_feature (1)...(641): n = A,T,C or G
actaaatggaggcacgtgggagaagggaggggccattgaggaacaaaaatgtgttttaaggaagagatgggaaagcagagaccaggtagaggagctaggtaagctgataggtgttgtcattggtagaaaagaagaagataaatggatgtaaggattgaggccttggaaagtagcataggcaggaaaagaggaattagaagaatacgtgaagaagtgggaatcatgggctgggaagggaaattttggaaaaggagcacattaaggcagaaaactcttttagagcagtggttttaaacttcagcaatggtgatccttttatacaagtatcccttactttggaatcccaggaagtaaaaggcacattcttgttgaagttggggaggagcacttggaaccctgcttgcttaactttttttcttttgggcccttgaagtgtagtatattttaaaatccactggtctanaagggagtagttaagttnaagggaaanaaaggatgattgggaaaagatcngacccgaagggactttttggtnacccaaaagttttnggtncccttggaaagggaaggggccccttttnggaattangggaaatggaaacttggaactgggnaaanttcctntnagcttaaccttgang

SEQ ID NO: 809 - DNA, 388 bp, Homo sapiens
  misc_feature (1)...(388): n = A,T,C or G
acaagagggtgggctgggccaggatgcccgagggctggccacagccacccccctcaaaggtgttgatgagaaaagagacaccttcttccttgagaacatctttcagccacaaattaggggatctgttgcctggcaataaaggaacgaatttataaaagagttcaatggatttgtgtcgacattctgtctggggcctcccacaatgagctaaaagccacttgaccagatccaataaacacaatgatgcggaaggtggaaatcctcgcggcaaacgtcgtttctttgctttatttaaagaaacatgcttcttttcaatgatgcggcataggtgatcaatggcatcacaacactgttgaattgtacctcggncgngaccacgctaaaggcc

SEQ ID NO: 810 - DNA, 175 bp, Homo sapiens; identical to SEQ ID NO: 513

SEQ ID NO: 811 - DNA, 329 bp, Homo sapiens
  misc_feature (1)...(329): n = A,T,C or G
ctgcgcggttgttctctggagcagcgttcttttatctccgtccgccttctctcctacctaagtgcgtgccgccacccgatggaagattcgatggacatggacatgagccccctgaggccccagaactatcttttcggttgtgaactaaaggccgacaaagattatcactttaaggtggataatgatgaaaatgagcaccagttatctttaagaacggtcagtttaggggctggtgcaaaggatgagttgcacattgttgaagcagangcaatgaattacgaaggcagtccaattaaagtaacactggcaactttgaaaatgtctgtacc

SEQ ID NO: 812 - DNA, 668 bp, Homo sapiens
  misc_feature (1)...(668): n = A,T,C or G
acggatgctacttgtccaatgatggtaaaagggtagcttactggttgtcctccgattcaggttagaatgaggaggtctgcggctaggagtcaataaagtgattggcttagtgggcgaaatattatgctttgttgtttggatatatggaggatggggattattgctaggatgaggatggatagtaatagggcaaggacgcctcctagtttgttagggacggatcggagaattgtgtangcgaataggaaatatcattcgggcttgatgtggggaggggtgtttaaggggttggctagggtataattgtctgggtcgcctaggagggctggtgagaatagtgttaatgtcattaaggagagaaggaagagaagtnaccgaagggcctctttanttgtgtaataanggttggaaggtgatttttatccgnaattgggangtgatccctaagggggttggttganccccntttcctgccanaaatagganggtgganttctgcttagggcttccaataattgangggcctnaaatnaanttgnaaanggtaaataaaaccttttnaagggttgggaccttgtttcttgngtnnancccccttannattccattggaacttaggcttggncccatgtnttgggantggcggataattaanttttgaaattncc

SEQ ID NO: 813 - DNA, 312 bp, Homo sapiens
ggtacaggcagggtagatctaactattggaaggaatccctaacacttttccagggtagaattctggctagtccaaaaagggtccttcttttaagggttttgagaaactagacactgcaacttattagtatcggcgacgtttgtttggggcaaattcagctccaggagctgcacggttgaatgcaggaggagttccaccaattgccccaattccttccattgtagcagcctgaccaaagcgttcagttgttggtggggtcaatcccaaagttccatccggcatcatagtggcaggtcctggaggagctggggt

SEQ ID NO: 814 - DNA, 551 bp, Homo sapiens
  misc_feature (1)...(551): n = A,T,C or G
caggtactctgaagtatacacaacaggtctaaacatctcccttgtcgtaagtagttgtgtaaaattcaagataaagatttagtctcatcttttaatgtcagtttttttccccatgttaaagggaatgaggaggagtcctcttttattcccccacaagaaaaagggagccacattaatatgtgtatattcccataactctaatgtaagtgcggatctccaaagcctagggatttttccgtaaaagagagtgggccgttctggttacccttttattagaagggtattccaccacagagagccggaggttttccagatgtgtgtaagagagcaggtgcgcaaggcaagcaaatgagcgcaaacagtattatggaaaacatttgagaagttagctccatgaggactgtgggcttcacaagaggactcgactgggtagccctggctgacanaggacctgaaaagcngagtattgcttcaaacttggaaccnttcataggagcctaacactgttggaagaagtaccttggcnggaccaccttangggcaattcnagc

SEQ ID NO: 815 - DNA, 619 bp, Homo sapiens
  misc_feature (1)...(619): n = A,T,C or G
ggtactgataacttcttgcttcagttcatctacaatgatctttccctctaaatcccagatcttgatgctggggcctgtggcagcacacagccagtagcggttagggctgaagcacagggcgttgatgatgtccccaccatctagcgtgtaaaggtgtttgccttcgttgagatcccataacatggcctggccatccttgcctccagaagcacagagggatccatctggagagacagtcaccgtgttcagatagcctgtgtggccaatgtggttggtcttcagcttgcagttagccaggttccataccttgaccagcttgtcccaaccacaggagacgatgatagggttgctgctgttgggcgagaagcggacacaagacacccactctgagtggctctcatcctggacagtgtattttgcacacacccagggtattccatagcttgggtggtttacctgnccggcggccgtcnaaanggcgaattcaccatggcggccgtactagngatncaacttggnccaacttggcggaatctggcatactggttcctngggaaattgtttcngtccaattccncnaaattnaaccggaagnttaaaggtaaaacttgggggccta

SEQ ID NO: 816 - DNA, 658 bp, Homo sapiens
  misc_feature (1)...(658): n = A,T,C or G
actccagcagccaggcatcccagatctcctgtcctggagggtgctggggcccctggctccccagagtgtgcaggcagacccccagagccctagctcatccatttatccattcctcataatccagtgtccaaagagtacccccagcagggcagggaaggtccctcccggggtttacatgactgattccttctcagaggcgaccgtggcatcccctgcgggcccccgatagtgtttgaggagggggtttccttcctcaggctctgtgcttctcgactccgtacaagcttttttttttttttttttttttttttggaaggagaacaattttattctaaaaatagaacttggtaacaatgaaataccaaaagctggtcattataataaaaagaaaagaanagtttaactttttttttgtgaaaattcnaaaattatcactataatatactgccaactntggtnaattngantttgaattatttcctttcatnggattatttcaagggaaatttttaaaattngnttttggcctaaaaccttnggccgggnaccncncttanggggcnaaattccaatccaantgggggggnccgtaacttaagggggancccaaccttgggnnccaancnttggggngtaaatcatggggcanancntgttt

SEQ ID NO: 817 - DNA, 141 bp, Homo sapiens
actttcttctgccataacttcttcctcagttcctacaggtgtgacacttttcaacttctttggaagaggcatttccactgtatcatcagagacttggtctgatgcttctatggtgctatcctcttcctcttcacgtgtacc

SEQ ID NO: 818 - DNA, 280 bp, Homo sapiens
ggtacttaagaactcaagtatagaaataaactgtgggctgaagtaacattgtaacctgctcccaacatgactgcataggtgtctaaggttaagtgtgaagattactgtgaggtctcaagttacttgactaatcaatcccatttgaatttcaatccaagcagcatattttacacacacctgaaggaaatatcttcagtgtgttcatgtgtgtgtctatgtgcatgtatgtgtaggggataggtgtaattagggaagggctgaccgaacaacattgataagt

SEQ ID NO: 819 - DNA, 635 bp, Homo sapiens
  misc_feature (1)...(635): n = A,T,C or G
ggtacttgagtccttctcatgggtggggtgattgcctcttctcatcaggagccaggagagagggggacagataggaggtggcccataggagcagtcccgctgcacaatggtaggcataggccatggcactggactgcctctaaggactgctaaaaagaatatttttttgtggtgtcagaactggaaaaagcactttcccttcgggcatttctggaaatgattattaatccacaaagaagaactctgtaagctttttcttgaattgtanccagtgagaaaagcagatagactgaagaatatgaaggatagctgagctgtncctncatagtggggcatgcctaggcatatggctggcttggagactactgatgcttttccctgagtttgtattggcactgangtatggccggcttgggccactgacttcccantaatggaatctgntnaaaacttggggattcctttagcttnntactggaagaaaanttttgtancnaaaagatttataaccnnttagnaataagtttnccagcancccnggattttttttnngcttgggggttnttggcgncctttannnaaggacngggcnttgnnnttcntctttacnaggccttgntntgancntggagaan

SEQ ID NO: 820 - DNA, 276 bp, Homo sapiens
acatcttcttcctgagttacgcttacaaaattttcaaacatagcaaccattgatggggcggcaatcacatgacaattcacaagatcagataaaaaacggaccaaatacacggcttcattataattgtttgctttcaatgattctttaagttgacgaatcatggcttctacaaattctccaccaaaattgtaattcctggcattcagtagtccaactaatgttgtataaattgtcagcttctcaggtaataggcgtgcactggattcataaatcacc

SEQ ID NO: 821 - DNA, 728 bp, Homo sapiens
  misc_feature (1)...(728): n = A,T,C or G
acaatgatgccagaagctttccttcaagaagctcagataatgaaaaaattaagacatgataaacttgttccactatatgctgttgtttctgaagaaccaatttacattgtcactgaatttatgtcaaaaggaagcttattagatttccttaaggaaggagatggaaagtatttgaagcttccacagctggttgatatggctgctcagattgctgatggtatggcatatattgaaagaatgaactatattcaccgagatcttcgggctgctaatattcttgtaggagaaaatcttgtgtgcaaaatagcagactttggtttagcaaggntaattgaagacaatgaatacacagcaagacaaggtgcaaaatttccaatcaaatggacaagctcctgaagctgcactgnatgggccggnttacaataaagtctgaaggcctggncattttggaattcttgcaaacccgaacttagttacccaaangggncccaatngccnttattcccaggtantngggggaaacccggnnaaagtaacccnttggggcccgggaaaccaccnccttaanggggccnaaattttccaggcnncnacttggggcggggcccggttancttaaggggggaatccccnaacntttggggaccccaanacntttgggcgggaaaaccnatnggggnccaaaanaccgnggntncccccgnggngggnaaaaaattggnnttnnc

SEQ ID NO: 822 - DNA, 632 bp, Homo sapiens
  misc_feature (1)...(632): n = A,T,C or G
actttacggcctgatctaattgaaagtgcatcccttgttgcaagtggcaaagctgaactcatcaaaacccatcacaatgacacagagctcatcagaaagttgagagaggagggaaaagtaatagaacctctgaaagattttcataaagatgaagtgagaattttgggcagagaacttggacttccagaagagttagtttccaggcatccatttccaggtcctggcctggcaatcagagtaatatgtgctgaagaaccttatatttgtaaggactttcctgaaaccaacaatattttgaaaatagtagctgatttttctgcaagtgttaaaaagccacataccctattacagagagtcaaagcctgcacaacagaagaggatcaggagaagctgatgcaaattacccagtctgcattcactgaatgccttcttgctggccatttaaactgtaggtgtgcanggtgactggccgttcctcagntncttgtggggaatcttccgtnaagatgaacctgacttgggancacttattttttnggctangnttaaaccttncatngngnncaactttacccangtngnttantatttngncccccgttaanacctttctncnngntcctccatttttg

SEQ ID NO: 823 - DNA, 649 bp, Homo sapiens
  misc_feature (1)...(649): n = A,T,C or G
actgctgcaacccatgcagcgtcaacttcgtctcatcatccacgaagatctccattggatcttgcatgaacttgcggcagactggacggatctctttgctcaaggtagcactgaacatcatgacctgcttctcgtggggggtcatgcgaaaaatttcctggacatcccgacgcatgtcgagctgttcaagcatcttatcacattcatccaaaataaagtgtttaatgtgtttgaggttgaggctcttatttcgagccagggctaggatacggcctggagtccccacgacgatatgcgggcagttcttcttcagcacctcttcatccttcttgatagacagaccaccaaaaaaaacagcaaccttgacattgggcatgtatttagagaagcgctcatattccttgctgatctgaaaagccaactcccgagtggtgacaccatcaccagcacagacacctgcccagtaacctggcttccaactggttgcantgnngggccaagaacaaacactggtggcttttccatgccccnatttgggcttggcnccaggaaattcanttcccaaaatgggcttgaagggatgccnttntgcttggacttttgacgggatgttnaaggccccagnttnanaatggncccggagcaattn

SEQ ID NO: 824 - DNA, 603 bp, Homo sapiens
  misc_feature (1)...(603): n = A,T,C or G
accccttataaaccagcaatgtcatctgtgaggaagcaaattctcaagtgtctgtcatttacttggttctttttctttgtggtcttcacccttataccctggaaaagtctgtaattaccttagccaggaagatagatggtcatggcaagcgcacagcaccagacttactggctcaccaagatgatggaaaaaggcagatgattttttaaaaagccgtaatgactcctttagaccagccatttagcgtggtaattttgaaaggcctagctccattgcagacttccaaagggtcagctctgagactgccctccaggtgggcagttgattatttccaccagtgttttccagagccttaaactgcctaagtgacaactacctcagttggcaggaaaagagacatatagtagaaagtgaaaaatgagcagtatttgggcagatgctatggggtacagttgaanggtaaaanggactttccttgggaacccttatnccctgngaatatgacctnggccggacacnttaaggcnattcacnntgngggccgtctaanggnnccacttggncancttgngnaaaaggcaaactgtnctgngnaatgtnccc

SEQ ID NO: 825 - DNA, 634 bp, Homo sapiens
  misc_feature (1)...(634): n = A,T,C or G
tgaaaaataaactattntatttcagtgtttgctccttgcggttcagaagcacatctactgcctggttggaacccaaggcttttataaaaccgtagagaaatatgagctctatgtatagagaaaatatacatgttgattaattgtgtgactctttcctgtgcaaagcagaaagttctaaatgcaacagcatgattctctccaagtccttccctgggatttggggggccctggaggctgtgatctcacctccaatagagaatccccaattcttccagcccaagggaggcccagncatgtagaaagagcaggagataaagtcaaagctgacaactcatgggttccccaagcttctccggggcaggggctatgtttgggggccttaccctgcaaagaaggggtagctggggtgccnaccttggtgggtaagtgccacactggcactaaagctgttgggaagtctagcattgcanccggccaggtttatgggtnaaccagggtgtccaangggtttttttccctaaaactnggggctnaaaggnggggaccctnggcncgaacccccttanggccaaatcccggcaattgggggccntttttaangggnnccaacttgggaccaaacttggngnaatnn

SEQ ID NO: 826 - DNA, 507 bp, Homo sapiens
  misc_feature (1)...(507): n = A,T,C or G
ggtacctgaagaacaaatcccttcagggttaagctcgacaggacactttccccagtcccaggtttccatttccctcattcccaaaaggggcccctccctctccatgcgcacacagaacttttcgctcacccaaaagtcccttctgtctgatcttttcccatcatctttcttccctctacttactactccctctagaacagtggattttaaatatactacacctcagggaccaaaagaaaaaagttaagcaagcagggttccaagtgctcctccccaacttcaacaagaatgtgccttttacttcctgggattccaaagtaagggatactgtataaaaggatcaccattgctgaagtttaaaaccactgctctaaaagagttttctgccttaatgtgctccttttccaaaatttcccttcccagcccatgattccacttcttcacgtattcttctaantcctctttttctggctatgctacttttcnanggctcaaaacttaaattcn

SEQ ID NO: 827 - DNA, 617 bp, Homo sapiens
  misc_feature (1)...(617): n = A,T,C or G
cgccagcgctgcaggagctgacatggacccaaatcctcgggccgccctggagcgccaacagctccgccttcgggagcggcaaaaattcttcgaggacattttacagccagagacagagtttgtctttcctctgtcccatccgcatctcgagtcgcagagaccccccataggtagtatctcatccatggaagtgaatgtggacacactggagcaagtagaacttattgaccttggggacccggatgcagcagatgtgttcttgccttgcgaagatcctccaccaaccccccagtcgtctgggatggacaaccatttggaggagctgagcctgccggtgcctacatcagacaggaccacatctaggacctcttctnctnctcctncgactcctncaccaacctgcataagccaaatccaagtgatgatggagcagatacgcccttggcacagtcngatnagaggaggaaaaggggtnttggangggcaaaancttgannctgcagntagcaatgggccctgctanaantgnccaccttggtnttttccaatnnnacncaggccaccnaacttttgganaaaccaanttttnttgcgnggcccaaggggaagnngnggat

SEQ ID NO: 828 - DNA, 448 bp, Homo sapiens
  misc_feature (1)...(448): n = A,T,C or G
actgtcacctttttaagtggaaagaaatatagtgtggatgatttacactcaatgggagcaggggatctgctaaactctatgtttgaatttagtgagaagctaaatgccctccaacttagtgatgaagagatgagtttgtttacagctgttgtcctggtatctgcagatcgatctggaatagaaaacgtcagctctgtggaggctttgcaggaaactctcattcgtgcactaaggaccttaataatgaaaaaccatccaaatgaggcctctatttttacaaaactgcttctaaagttgccagatcttcgatctttaaacaacatgcactctgaggagctcttggcctttaaagntcacccttaaggccttngtttatttaancatgaactgatggtaactgnacctcngncgcgaccacnctaaggccaattccananactgnccggcg

SEQ ID NO: 829 - DNA, 619 bp, Homo sapiens
  misc_feature (1)...(619): n = A,T,C or G
cgaggtacttttaaagcagggagtggggaaaagtattttgaggggacattttcatcatcagttcagctttttttttttggttgttgctcttttttgggggggttgggtttgttggtttcactgaaacatttaactacctgtaaaatctaaacatggctgttagtgtcacaccaattcgggacacaaaatggctaacactggaagtatgtagagagttccagagggggacttgctcacggccagacacggaatgtaaatttgcacatccttcgaaaagctgccaagttgaaaatggacgagtaatcgcctgctttgattcattgaaaggccgttgctccagggagaactgcaaatatcttcatccacccccacatttaaaaacgcagttggagataaatggacgcaataacttgattcagcagaagaacatggccatgttggnccagcaaatgccactagnccatgccatgatgcctggtgcccattacaacccgngccatngttcaattgnccaacttaccnccatgcntaacagccgctttannccttttggaccttttttccancttggcccggcaaaattttccantggccaattggttccgggantccgggtcct

SEQ ID NO: 830 - DNA, 618 bp, Homo sapiens
  misc_feature (1)...(618): n = A,T,C or G
ggtacaccctagccaacgggacaaatcctagagggtataaaatcatctctgctcagataatcatgacttagcaagaataagggcaaaaaatcctgttggcttaacgtcactgttccacctggtgtaatatctctcatgacagtgacaccaagggaagttgactaagtcacatgtaaattaggagtgttttaaagaatgccatagatgttgattcttaactgctacagataacctgtaattgagcagatttaaaattcaggcatacttttccatttatccaagtgctttcatttttccagatggcttcagaagtaggctcgtgggcagggcgcagacctgatctttatagggttgacatagaaagcagtaagttgtggggtgaaagggcaggttgtcttcaaactctgtgaggtagaatccttnnctatacctccatgaacattgactcgtgtgttcagagcctttggcctctntggnggagtctngctntttgggctcctgggcatccttttgaatagtcactctgtaaaactngccanngctttgaaactgggtnctttacccanggtgnaagggnctttgttggcctttanaagggtnggncatncctccaaaacc

SEQ ID NO: 831 - DNA, 648 bp, Homo sapiens
  misc_feature (1)...(648): n = A,T,C or G
acatgaaagacacgtccacatcacagttgcccccaaactgcctgtgctcctcgatggtgtctctccctccagaaaacgcatgcttattgaccttggttttgatctgcttggccgtgtcggtgaggaagatggaggagttggggtcgctggcactcattttggtctgggcgccctgcagggctgggaagaaggtggagtgcaacagggctggtttaggatagccgatcctgggggcgacgtcccttgtcattctaaagtaaggatcctggtcaatggcacatgggataaggcactggatatccgtcctgtctcggaagatctgtgggaatgagttgctgaaggagggagcagcctggatggcaggaaaactgatcttcccaatgcagtcgctgtcagtgaaacncgaaaaatgcctttcactttggtttgaaggtaacatgcctttttgaatcttcaccacattttttgtagaaaccttggnccttnatnccccatgtagnnccaggttcanaanaatnttgaaaagnctttggtggaaggtcaaaancnccaggccaantaaaggncctttggnaattttttcccnggntataactttntnggcctgggnccaaggtcaanggccctttccnaannaactttttnggn

SEQ ID NO: 832 - DNA, 689 bp, Homo sapiens
  misc_feature (1)...(689): n = A,T,C or G
gtccccacgaactggcctggccaagcaccccacactggagccatctcttcctcatatttcagcagtgcagccggggggcagggaagggcaggcagggtctgttggggtctctttttatccttattcctcccccgacctaattgtctttgttctgtgattattgggggacacccggctccctccagacaatgccagcataaatccatccatccaaaggcagagaaccaaaggggccatggaaggttctctgtgctcctcctacccttccagtgccctaggcctggcgactgcccctgccttttagacccgcctcccttttatacctgctcttgntctactgagaaaagcctctcagcaataatgntttctagtcacttcctccgncttcgggacgggcgtgcctggacacttgtaccttnggcccgcgaaccacgcttaaggggcgaaattccaagcacncttggccggccggttaccttngtngggatncccaaccttnggnnncccaaaccttgggcggtaaaccatngggnccttaacctngngttccctgggggngnaaaantngtaatttccgggtttacccaattttccnccccaaacnttntcccaaancccgggaaaacccttaaaaggngggaaaaanccccttgggggggggccctnaannnggagggtggngcnttanc

SEQ ID NO: 833 - DNA, 726 bp, Homo sapiens
  misc_feature (1)...(726): n = A,T,C or G
ggtactaatgtgaattgttcctcagaaacgcttcttttccatcctagtgagaagctggccctgcaggtggtggcagcaatggtgttgtaagatttcctcccgtagttttttctcctcatggatttgaatgaaatgccaataacacgtccactttcaacgtgtagtttacgcggagcactttcgaggcctggccgggttgggcctacttctcacctgggcctatcttctgaactcgctaggttcttatcaacatttgggggataactttgtatatttttttcattnggcttttctttaccagtttctgatttttattctcaatatatttttgctaaaacctatttcacaaatnaccaccngactgaaagtgtgtgnttactgatgcggcccttgagcttccatgggcgaaaggagtgacttttgcagcngccgtnaagaacccgnaaatctggtttnanagcnccanggaaagtngaccaccnttanggggagcccccncgtangggggcgctttgtaangcccnccngggggaaccccccannnaccggtgggggtccttaaaagnaanananaccgggggtctttaagcttntttccttgggccacncccccaaaannngggnttttcccaatttnttaanacnctntcttgnggggggtcctnggnggaaatggnggaaaaaaangcccnnntnnttgttnggggngggnaccncaangtggng

SEQ ID NO: 834 - DNA, 628 bp, Homo sapiens
  misc_feature (1)...(628): n = A,T,C or G
ggtacgagagtgtagccaaagtgagaggctgagagcaaaggagacatttttttcagttttgagtcgagtatccagacagaggcaaatcattttgtttaactttttattaaagtgtaactatagaaacacatcaatgatttttcacaagtggagcactgtgcatacaatcggcaccccagaagccccccgtcagattcccttccagttaactacctctccaagggaaaccactatcctgagttctaagcgcatagattagtttctgtctggtttggggagatatataaatggaattatgcattcttcgtatctggttncttttcaccaatattatgtttgtgagatttttggtgcatgtatttgtacagntttgctgattttaggtgttgcgcctcattgggaacagtttgctataggttgaagagaaaatttgctcttccggtttantggcaccanggagcanaatgcccncagtgtntggnctcngataatgggtcgaaattgggangtgggctggacntttttnacttgntctttctgatctngantcggttncctattcnatatttggntntcttcggaattnnttgntngaacttgcctgggccnggctgttctanagggnnag

SEQ ID NO: 835 - DNA, 602 bp, Homo sapiens
  misc_feature (1)...(602): n = A,T,C or G
ggtactgaaatcacaagagctataactgccagagaaaaattaaatggggtcttcaagtagtgactgagccagcaaactaagtggccaagagggagacaagagcagctcctaaagaaggttgaagtcaagcaatctccggaacacagaggatctgaagcatctgggcagagccacaggcaggcanggcaaggacacacagcacaccagagcagcaccgtccttcactgtgtgagagcaactctcaggctgcagaaccaattgccatctccactgcctacagctcaggtctccaactaccagatagggagtaaaaaacagtttgattttattcacctcaagtctaaacacggngggaaaaaaaactggtctanagatggaaactatatttcatgggggtttattaaacagagaaagaggagaattttcacatttcacagggcttttcntgaaataaagacttgatctgaaaaggcacccttatggcangctttaacttcctaagntngggnagnncccaaattttccannaatcttgggaccncttgcccagtngattttttttaaataactnagctnaattgntnggntaatttnataanang

SEQ ID NO: 836 - DNA, 355 bp, Homo sapiens
  misc_feature (1)...(355): n = A,T,C or G
acacaatgcttctgccagtcctattcagggccaaggacatgtgcttataaccatctgccaaattttccaaactgtcacagtaacaaccatcaaattttagcagatctactccccagtcagcaaaggtctgggcatcaatgtcgtagtatccaaaactcccagggaagcctgcgcaggttttatttccaacatctgcataaatccctagcttcagtcctttgctgtgaacataattagctagctggcgaatcccatgaggaaagcgctgagggtctgcctgaagtctgccttctgaatctctttggggagccatccaacagtcatcaatgcagaggtacctcggncgngaccacgc

SEQ ID NO: 837 - DNA, 611 bp, Homo sapiens
  misc_feature (1)...(611): n = A,T,C or G
ggttttttttttcgtgattgtattcccataaagctttatttgtggactctaaaatttgaattttatgtgattttcacatatcacaaacattcttcttcttttaatttttctaaccattaaaattataaaaaactttcttatttttgcaggccatacaaaattaggcagtgggccaaatctggccgctagtttagaaggtccacggtagtctcgctcgcaggcatggcagttgcagctggctggggcaccctggttctcctccacaaggcctttcatcctccagaagtctgaattggccttgttcatggcactttcagggcagcattccaagaggtggaagggagagtctgcaaagacttctgaggctggctccagacctcactcagtatccccactgctccatttcagtcagagtnaagtcactagtnctgcccagactcaagggatgaagggaactgnctntanctcatgatgaagataacntgtgaaatactgggggctgagtttttcanttancnccagggagtaattttcatggnttaaanggcattcccccttatttttgaagccntaanttcnggcntttanngggaantaattaaccnccctta

SEQ ID NO: 838 - DNA, 650 bp, Homo sapiens
  misc_feature (1)...(650): n = A,T,C or G
ggtacttccacctcgggcacattttgggaagttgcattcctttgtcttcaaactgtgaagcatttacagaaacgcatccagcaagaatattgtccctttgagcagaaatttatctttcaaagaggtatatttgaaaaaaaaaaaagtatatgtgaggatttttattgattggggatcttggagtntttcattgtcgctattgatttttacttcaatgggctcttccaacaaggaagaagcttgctggtagcacttgctaccctgagttcatccaggcccaactgtgagcaaggagcacaagccacaagtcttccagaggatgcttgattccagtggttctgcttcaaggctttcactgcaanacactaaagatccaagaaggccttcatggcccncnccangcccggatcgggtanctggccgggcnggncngtnnnaaagggcnaaatttcngcacacttggccgnccgttactaagtnggantccnaagcttggntanccaagctttggngnaattctngggcatannnctgggtnccttgnnggnaaaatgntantcccgtnnnaaattcccttcancnnanctgancctgaaagctttaantgggnaaacnttgggggtccctaattngggggacntaacntctnt

SEQ ID NO: 839 - DNA, 626 bp, Homo sapiens
  misc_feature (1)...(626): n = A,T,C or G
actaaacgagcaggtgaaggaggctgaaggatcgtctgctgaatacaagaaagaaattgaggaactaaaggaactgctacccgaaattagagagaagatagaagatgcaaaggagtctcagcgtagtgggaatgtagctgaactggctctgaaagctactctggtggagagttctacttcaggtttcactcctggtggaggaggctcttcagtctccatgattgccagtagaaagccaacagacggtgcttcctcatcaaattgtgtgactgatatttcccaccttgtcagaaagaagccttcacaattatatctttagaggaaaccagaggaaganagtccncggaaagatgatgcaaagaaagccaaacaagagcncggaagtgaacggaaggcntttggggatgcctgtccccaagtggaaaatgaagtttcngaaaacantggaggaggangctganaatcaggctgaaagccnggccnccaatggaagggaccattgtanggcttggancttcnggtngaaagccnttgctttttaaaaanggggcccagncctttcttccangggaaaagggnttttggaattaaangnttttttnacnttttgganggatccttttggt

SEQ ID NO: 840 - DNA, 323 bp, Homo sapiens
ggtacagcagccttctttgctggaggcccttgaacttcctcctcctcctcgctgctgtcctcactgtcactggatgaggccttcttcttagctttcttagccactggtccatttgcctgtaactttcgctctgggaccttggcagacctgttgagccagaagctatagatgtctaagagggaagaggcattggcatcctgctgtgtagctcctgtcgctttggcgaacttattggccacctctgagagttggttatcgcgcaggaagccgagcacgaggggatacaggtcgctgggaaccacgcggcgaatgccggcgtccgc

SEQ ID NO: 841 - DNA, 614 bp, Homo sapiens
  misc_feature (1)...(614): n = A,T,C or G
acattgaaaatgagggtaagatgatcatgcaggataaactggagaaggagcggaatgatgctaagaacgcagtggaggaatatgtgtatgaaatgagagacaagcttagtggtgaatatgagaagtttgtgagtgaagatgatcgtaacagttttactttgaaactggaagatactgaaaattggttgtatgaggatggagaagaccagccaaagcaagtttatgttgataagttggctgaattaaaaaatctaggtcaacctattaagataccgtttccaggaatctgaagaacgaccaaaattatttgaagaactaggggaaacagatccaacagtatatganaataatcagctctttcaanaaacaaggaggaccngtattgatcatttggatgctgctgacatgaccaaggtagnanaaagcncaaatggaagcaatggaattggatgaataaccaagcttaattctgctgancaagcnatagtttgncattggntnnagttgttangtccnaagagnattgaancttaaanttnagggctgccaangnctttggccggnacncncntnagggcnatttcagccncttggcggccgttctatggnnncnn

SEQ ID NO: 842 - DNA, 609 bp, Homo sapiens
  misc_feature (1)...(609): n = A,T,C or G
ggtacacttgctaaatttgaatgggcangcagcaaactctgggaagacttctaatgctttacgatacaagcgaactgcctcttcaatgtttccctgttctcgtttgatattggctaggttattcagagagtctgcatgggtgggacacagacggagagctgtattataacaatcttctgcttcagcaacctgtcaaaaatgcgtgcctctttcaagacatttcctaaattgatataagcatccagaaagtttgggtcaagggtgacagccttttcaaagtgatgaattgcaagccaaatttccccttgtgcattgaaaacacagccaagattactccaagctactgcaaagttcggttgcgtctcaattgctttcaaataacatgccttggcttcttccaagcgacccaaggcttttacaggtncccaggtcactgcgaacacagtacctgcccggcggccgttcaaanggcgaaattcagcacacttgcggncgtantagtggantncnagcntcggnccaacttgggnntataatgggcanaactggtccctgggggaaantggtnnccnntaccatttcnccacttncgaccggaagcttaaangg

SEQ ID NO: 843 - DNA, 610 bp, Homo sapiens
  misc_feature (1)...(610): n = A,T,C or G
ggttttttttcgcaggtatttcctctgctttaatagacaattttagaaagacatgttaacgggggaaaatcacacaatactaaggatctgagggccataaacatcacatatgttgagtttgcttttagttttgtttccaacagttcttaaccaatgttcctggctgtaatctaggtgctagacgcactgcaaatcctcgaaagtgtttaagatgaaagagcaatacacttaagatcttcaaaagtttacattaacagaataagcattagctccttttaacacacacacacaactaaattaacaaatgaaatgtgtctacttttatatatgcccataaagcagacacttaacattgaaatttactattttagattttcactcctttaagagctatcaatatagacactnaagataattcacatttnaaaaattatctacctggaagaatagaacttctttaagaaggaaaaagnaaaagctggtgaaaccaaggattgcctggggtnggaaggaccgntttnaacctgggccttaaatgncntgagnacaattgattggtcnnncttgggctntnttggtaacaccggccttcanggttttcttgacccnc

SEQ ID NO: 844 - DNA, 675 bp, Homo sapiens
  misc_feature (1)...(675): n = A,T,C or G
ggtacacctgaattccaggccaatgaagttcggaaagtgaagaaatatgaacagggattcatcacagaccctgtggtcctcagccccaaggatcgcgtgcgggatgtttttgaggccaaggcccggcatggtttctgcggtatcccaatcacagacacaggccggatggggagccgcttggtgggcatcatctcctccagggacattgattttctcaaagaggaggaacatgactgtttcttggaagagataatgacaaagagggaagacttggtggtagcccctgcaggcatcacactgaaggaggcaaatgaaattctgcagcgcagcaagaagggaaagttgcccattgtaaatgaagatgatgagcttgtggccatcattgcccggacagacctgaagaagaatcgggactacccactagccttccaaagatgcccaagaaaccagcttgcttgtgttgggcaagccattgggcacttcattgaaggattgaccaaggttttanggccttggacctttggtttggccccaaggctttggtgttggaattgtaaatggggtttttgggactttttttncccanggggaaaatttccctttttttcncnanttccaattttgngatccaaagtncccttggccccggggccgggcccgtttcaaaaangggcc

SEQ ID NO: 845 - DNA, 620 bp, Homo sapiens
  misc_feature (1)...(620): n = A,T,C or G
acagcctaagacacaaggatctaggcgaagtagccgccaaataaaaaaacgaagggtcatatcagattctgagagtgacattggtggctctgatgtggaatttaagccagacactaaggaggaaggaagcagtgatgaaataagcagtggagtgggggatagtgagagtgaaggcctgaacagccctgccaaagttgctcgaaagcggaagagaatggtgactggaaatggctctcttaaaaggaaaagctctaggaaggaaacgccctcagccaccaaacaagcaactagcatttcatcagaaaccaagaatactttgagagctttctctgcccctcaaaattctgaatcccaagcccacgttagtggaggtggtgatgacagtagtcgcctactgnttggtatcatgaaactttagaatggcttaagggaggaaaagagaanaaatgancncaggangaaggcctgatcaccccgattttgatgcctttnccctntntgggncctggaggatttcntcaaatctttgganccttggccnnnacccccnttangggcgnaatccagcccttggnggnccgttcttaggggatcncagcttgggnccaactttggggtan

SEQ ID NO: 846 - DNA, 617 bp, Homo sapiens
  misc_feature (1)...(617): n = A,T,C or G
caggtacataaagcagattcaagggttaaaataaaaacagaattttggagtgtggtcaaataaggtgcacagattccagaaccctcagagggcctgctggccctctccagacattctgtgtccgtggtgcaggagctgggcccgtccctaacagctccgcactggcttagtgcagtggtgctcacagtttcaggaactactaggtgaagtgtctggctcaagtctgccaagtgtcttcactccatcgtcagaagtggagcactatccctaggttcgattcccatgaaatattttatgatttccatcctctttgcccgctcttccaaataaggccctgtgatgccaacnaagggggcatggttgagggtctaaggctctcattagggcctaattctgtgtggatatnaacacatgacagacacttgctgcancattnangacatttaaggcagaggggtcatttaangntacttttncaaattaatatttngnggatngggcagttcttacctgnnactggtnnttattggggnaattttttaccanggggctgtctattttaaatngcttnggnattacnngtttngnaccctcnaannnctngggaaacttnntnc

SEQ ID NO: 847 - DNA, 638 bp, Homo sapiens
  misc_feature (1)...(638): n = A,T,C or G
ggtacaagcttttttttttttttttttttttttttttagcctttccttatgagcatgcctgtgttgggttgacagtgagggtaataatgacttgttggttgattgtagatattgggctgttaattgtcagttcagtgttttaatctgacgcaggcttatgcggaggagaatgttttcatgttacttatactaacattagttcttctatagggtgatagattggtccaattgggtgtgaggagttcagttatatgtttgggattttttaggtagtgggtgttgagcttgaacgctttcttaattggtggctgcttttaggcctactatgggtgttaaattttttactctctctacaagggtttttcctaantggccaaaagagctggtccttctttgggactaaccagttaaattttaccangggggaatttaanaggggttcttgggggccaaattttaaaggtcngaacttaagantcttatcttgggacaanccagntnttcaccaggcnttggnaagggtttngtcngcctttaccntaaaaatctttcccnctantttnctaccnnaaccggggggcncttttaaacgnnntttangggancccccccnggtttnggggggttnaactttgcnn

SEQ ID NO: 848 - DNA, 347 bp, Homo sapiens
ggtttttttttttttcaacagacaaaaaaagtttattgaatacaaaactcaaaggcatcaacagtcctgggcccaagagatccatggcaggaagtcaagagttctgcttcagggtcggtctgggcagccctggaagaagtcattgcacatgacagtgatgagtgccaggaaaacagcatactcctggaagtccacctgctggtcactgttctcatccaggctgcccatcagcttcttcagcccctcctcatccactttctcccccacaaagctgggcagctccttgtgcagaagttccttcatttcccccttactcagcttgaacttgtcgccctcttggcaggagt

SEQ ID NO: 849 - DNA, 624 bp, Homo sapiens
  misc_feature (1)...(624): n = A,T,C or G
actgctggaaatacaatcttcagcaggtgctgatgcaggctggaatttggctggagcggaccctcccattggtttagaagttgctttagtgggtggagcaggcttggctggcatgctaactttggctttctctagcatggccaatacctgatctttagaagttggctttagtttcccagtagccttggccattttttcatatcctaaatgcatcatgaagaatggcaaggcatcttgggccttctttcgcacatctccatttcgatcttctaggcaggagtagagatgaggaacacaaaggataaggtctgtaggggtggaacgaagagtaggtagtttctcaaccagccagcccagaagctcttgcctcaagaaaggattttcttttgagctcttcagaaagaacttctccttcaaccattccttnatgcccantctggttntggccaagcatttcacaggtcgctangggcaagcacttcgaacattggtcttgcttgctccaaggacttgggaatnaanggggangcctnaaattttttancgggtggcttaaaatttggggccnanggttattgccaaattgtttccagggatttnaacggtttggtggncctcggcccg

SEQ ID NO: 850 - DNA, 636 bp, Homo sapiens
  misc_feature (1)...(636): n = A,T,C or G
acaagttatcaaacttctgtttggtaacagaatcattgacgttcatggccggaacacagagcttcccagctttggagagctgatacagcctgtgaacaccagtcacgctctcttccacaatgcctcggatcttcttaaacacgtttggatacttcttataaacccagtgggttaagtctcccccatcatccaggatcatgttggcctgccacccatccatgttcacacagcggtcaatacaccaccagaagtcatcttctgactcgcccttccaagcgaacactgcaactccagcctcagccagtgctgcagctacttcattctgagttgagtagatgttacaagcagaccagcggcactgagcccccagagcacagagtgtctcaatcaacacccgctgtctgggctgtgatgtgtgtatcttnggccgngaacangcttaagggcgaattncacacaacttggcggccggtacttagtgggaatccancttngntacccaagcttgggcgtaantcatngggcatangcntggttcctnggggaaantggtatncggttanaanttccaccaacnttcnaancccggaagnnttaaangntaaaancttngggggcctaantgagnnganntac
